(19) United States
(12) Patent Application Publication
(10) Pub. No.: US 2026/0021144 A1
(43) Pub. Date: Jan. 22, 2026

(54) SYSTEMS FOR CELL PROGRAMMING TOWARDS CHONDROGENIC LINEAGE AND METHODS THEREOF

(71) Applicant: Syntax Bio, Inc., Chicago, IL (US)

(72) Inventors: Ryan CLARKE, Chicago, IL (US); Bradley J. MERRILL, Oak Park, IL (US)

(21) Appl. No.: 19/285,507

(22) Filed: Jul. 30, 2025

Related U.S. Application Data
(63) Continuation of application No. PCT/US24/14094, filed on Feb. 1, 2024.
(60) Provisional application No. 63/482,721, filed on Feb. 1, 2023.

(51) Int. Cl. A61K 35/35; C12N 5/077; C12N 15/85

(52) U.S. Cl. CPC A61K 35/35; C12N 5/0655; C12N 15/85; C12N 2800/107

(57) ABSTRACT

Provided herein are systems of modulating gene expression, methods of use thereof, and cells engineered thereof for the purpose of differentiating cells, for example chondroprogenitor cells.

### CROSS-REFERENCE

[0001] This application is a continuation of International PCT Application No. PCT/US24/14094, filed Feb. 1, 2024, which claims the benefit of U.S. Provisional Patent Application No. 63/482,721, filed on Feb. 1, 2023, each of which is incorporated herein by reference in its entirety.

### SEQUENCE LISTING

[0002] The instant application contains a Sequence Listing which has been submitted electronically in XML file format and is hereby incorporated by reference in its entirety. Said XML copy, created on Jul. 30, 2025, is named 61684-710_310_SL.xml and is 1,984,169 bytes in size.

### BACKGROUND

[0003] Heterologous proteins and/or nucleic acid molecules can be utilized to elicit a desired response in a cell. The heterologous proteins and/or nucleic acid molecules can regulate genes of interest (e.g., transgenes and/or endogenous genes) to program (e.g., differentiate, de-differentiate) a cell. In some cases, endonuclease-based technologies (e.g., clustered regularly interspaced short palindromic repeats (CRISPR)-associated protein or “CRISPR/Cas”) have been adopted for manipulation of polynucleotide sequences, epigenetic modification thereof, and/or expression level thereof. For example, the CRISPR/Cas technology can be characterized by its versatility and facile programmability and can be used to promote genome editing across different species and cell types.

### SUMMARY

[0004] The present disclosure provides methods and systems for programming a cell, e.g., to elicit a desired response in the cell. Systems and methods of the present disclosure can promote conversion of a cell from one type to another. Systems and methods of the present disclosure can utilize a genetic circuit to control a cascade of a plurality of desired expression and/or activity profiles of a plurality of genes in the cell to affect this conversion. Systems and methods of the present disclosure can utilize heterologous proteins and/or nucleic acid molecules as building blocks of such genetic circuit.

[0005] In some embodiments, the present disclosure provides a method for conversion of a plurality of stem cells into a plurality of chondrogenic cells, via modulation of expression levels of a plurality of distinct target genes comprising a first homeobox protein and a second homeobox protein, the method comprising: (a) contacting a first polynucleotide sequence in the plurality of stem cells by a first heterologous gene regulating moiety to modulate expression level of the first homeobox protein that is operatively coupled to the first polynucleotide sequence; and (b) contacting a second polynucleotide sequence in the plurality of stem cells by a second heterologous gene regulating moiety, to modulate expression level of the second homeobox protein that is operatively coupled to the second polynucleotide sequence.

[0006] In some embodiments, the present disclosure provides a method for conversion of a plurality of stem cells into a plurality of chondrogenic cells, via modulation of expression levels of a plurality of distinct target genes comprising a first distinct target gene and a second distinct target gene, the method comprising: (a) contacting a first polynucleotide sequence in the plurality of stem cells by a first heterologous gene regulating moiety to modulate expression level of the first distinct target gene that is operatively coupled to the first polynucleotide sequence; and (b) contacting a second polynucleotide sequence in the plurality of stem cells by a second heterologous gene regulating moiety, to modulate expression level of the second distinct target gene that is operatively coupled to the second polynucleotide sequence, wherein a combination of the first and second distinct target genes is: (i) a first homeobox protein and a second homeobox protein that are different; (ii) two different members selected from the group consisting of a homeobox protein, a T-box transcription factor (TBX), and a basic helix-loop-helix transcription factor (bHLH); or (iii) a first member selected from the group consisting of the homeobox protein, the TBX, and the bHLH, and a second member comprising SOX or collagen.

[0007] In some embodiments, the present disclosure provides a method for conversion of a plurality of stem cells towards chondrogenic differentiation, the method comprising: contacting a polynucleotide sequence in the plurality of stem cells by a heterologous gene regulating moiety to modulate expression level of a target gene that is operatively coupled to the polynucleotide sequence, wherein, within less than 7 days following the contacting, a conversion rate from the plurality of stem cells to chondrogenic cells is characterized to be at least about 30%.

[0008] In some embodiments, the present disclosure provides a method for treating a subject in need thereof, the method comprising: administering a plurality of chondrogenic cells to the subject, wherein the plurality of chondrogenic cells is prepared by subjecting a plurality of stem cells to ex vivo differentiation, wherein, within less than 7 days of the ex vivo differentiation, a conversion rate from the plurality of stem cells to the plurality of chondrogenic cells is characterized to be at least about 30%.

[0009] In some embodiments, the present disclosure provides a system for conversion of a plurality of stem cells into a plurality of chondrogenic cells, via modulation of expression levels of a plurality of distinct target genes comprising a first homeobox protein and a second homeobox protein, the system comprising: (a) a first heterologous gene regulating moiety configured to bind a first polynucleotide sequence in the plurality of stem cells to modulate expression level of the first homeobox protein that is operatively coupled to the first polynucleotide sequence; and (b) a second heterologous gene regulating moiety configured to bind a second polynucleotide sequence in the plurality of stem cells to modulate expression level of the second homeobox protein that is operatively coupled to the second polynucleotide sequence.

[0010] In some embodiments, the present disclosure provides a system for conversion of a plurality of stem cells into a plurality of chondrogenic cells, via modulation of expression levels of a plurality of distinct target genes comprising a first distinct target gene and a second distinct target gene, the system comprising: (a) a first heterologous gene regulating moiety configured to bind a first polynucleotide sequence in the plurality of stem cells to modulate expression level of the first distinct target gene that is operatively coupled to the first polynucleotide sequence; and (b) a second heterologous gene regulating moiety configured to bind a second polynucleotide sequence in the plurality of stem cells to modulate expression level of the second distinct target gene that is operatively coupled to the second polynucleotide sequence, wherein a combination of the first and second distinct target genes is: (i) a first homeobox protein and a second homeobox protein that are different; (ii) two different members selected from the group consisting of a homeobox protein, a T-box transcription factor (TBX), and a basic helix-loop-helix transcription factor (bHLH); or (iii) first member selected from the group consisting of the homeobox protein, the TBX, and the bHLH, and a second member comprising SOX or collagen.

[0011] In some embodiments, the present disclosure provides a system for conversion of a plurality of stem cells towards chondrogenic differentiation, the system comprising: a heterologous gene regulating moiety configured to bind a polynucleotide sequence in the plurality of stem cells to modulate expression level of a target gene that is operatively coupled to the polynucleotide sequence, wherein, within less than 7 days following the contacting, a conversion rate from the plurality of stem cells to chondrogenic cells is characterized to be at least about 30%.

[0012] In some embodiments, the present disclosure provides a composition for treating a subject in need thereof, the composition comprising: a plurality of chondrogenic cells prepared by subjecting a plurality of stem cells to ex vivo differentiation, wherein, within less than 7 days of the ex vivo differentiation, a conversion rate from the plurality of stem cells to the plurality of chondrogenic cells is characterized to be at least about 30%.

### INCORPORATION BY REFERENCE

[0013] All publications, patents, and patent applications mentioned in this specification are herein incorporated by reference to the same extent as if each individual publication, patent, or patent application was specifically and individually indicated to be incorporated by reference. To the extent publications and patents or patent applications incorporated by reference contradict the disclosure contained in the specification, the specification is intended to supersede and/or take precedence over any such contradictory material.

### BRIEF DESCRIPTION OF THE DRAWINGS

[0014] The novel features of the invention are set forth with particularity in the appended claims. A better understanding of the features and advantages of the present invention will be obtained by reference to the following detailed description that sets forth illustrative embodiments, in which the principles of the invention are utilized, and the accompanying drawings (also “Figure” and “FIG.” herein), of which:

[0015] FIG. 1 is a schematic of the heterologous genetic circuit. An activating moiety initiates the circuit and can activate a gate unit. A gate unit is comprised of a gate moiety and/or a gene regulating moiety.

[0016] FIG. 2A depicts the developmental progression from an iPSC to a cartilage cell, including genes known to affect cartilage cell development at different stages. FIG. 2B depicts an example of a heterologous gene circuit that differentiates chondroprogenitor cells from mesoderm cells.

[0017] FIG. 3 depicts an exemplary heterologous genetic circuit.

[0018] FIG. 4 shows a scatter plot (e.g., a volcano plot) to identify one or more heterologous genetic circuits that induced the stem cell to chondroprogenitor cell conversion.

[0019] FIGS. 5A-5D shows examples of chondrogenic progenitor cell marker analysis data utilized to generate the scatter plot in FIG. 4.

[0020] FIGS. 6A-6B shows that top performing heterologous genetic circuits convert approximately 60% of cells to chondrogenic progenitor cells in four days. FIG. 6C depicts a summary of the data from FIGS. 6A-6B.

### DETAILED DESCRIPTION

[0021] While various embodiments of the invention have been shown and described herein, it will be obvious to those skilled in the art that such embodiments are provided by way of example only. Numerous variations, changes, and substitutions may occur to those skilled in the art without departing from the invention. It should be understood that various alternatives to the embodiments of the invention described herein may be employed.

[0022] Whenever the term “at least,” “greater than,” or “greater than or equal to” precedes the first numerical value in a series of two or more numerical values, the term “at least,” “greater than” or “greater than or equal to” applies to each of the numerical values in that series of numerical values. For example, greater than or equal to 1, 2, or 3 is equivalent to greater than or equal to 1, greater than or equal to 2, or greater than or equal to 3.

[0023] Whenever the term “at most,” “up to,” “no more than,” “less than,” or “less than or equal to” precedes the first numerical value in a series of two or more numerical values, the term “at most,” “up to,” “no more than,” “less than,” or “less than or equal to” applies to each of the numerical values in that series of numerical values. For example, less than or equal to 3, 2, or 1 is equivalent to less than or equal to 3, less than or equal to 2, or less than or equal to 1.

[0024] As used in the specification and claims, the singular forms “a,” “an,” and “the” include plural references unless the context clearly dictates otherwise. For example, the term “a gate unit” includes a plurality of gate units.

[0025] The term “about” or “approximately” generally mean within an acceptable error range for the particular value as determined by one of ordinary skill in the art, which will depend in part on how the value is measured or determined, i.e., the limitations of the measurement system. For example, “about” can mean within 1 or more than 1 standard deviation, per the practice in the art. Alternatively, “about” can mean a range of up to 20%, up to 10%, up to 5%, or up to 1% of a given value. Alternatively, particularly with respect to biological systems or processes, the term can mean within an order of magnitude, preferably within 5-fold, and more preferably within 2-fold, of a value. Where particular values are described in the application and claims, unless otherwise stated, the term “about” meaning within an acceptable error range for the particular value should be assumed.

[0026] The term “guide nucleic acid,” “guide nucleic acid molecule,” and “gNA” as used interchangeably herein, generally refer to 1) a guide sequence that can hybridize to a target sequence or 2) a scaffold sequence that can interact with or complex with a nucleic acid guide nuclease. A guide nucleic acid can be a single-guide nucleic acid (e.g., sgRNA) or a double-guide nucleic acid (e.g., dgRNA). sgRNA can be a single RNA molecule that contains both a scaffold tracrRNA and a crRNA which can be complementary to the target sequence. Alternatively, dgRNA can be a single RNA molecule that contains a crRNA annealed to a tracrRNA through a direct repeat sequence.

[0027] The use of the alternative (e.g., “or”) should be understood to mean either one, both, or any combination thereof of the alternatives. The term “and/or” should be understood to mean either one, or both of the alternatives.

[0028] The term “genetic circuit,” “biological circuit,” or “circuit,” as used interchangeably herein, generally refers to a collection of molecular components (e.g., biological materials, such as polypeptides and/or polynucleotides, non-biological materials, etc.) operatively coupled (e.g., operating simultaneously, sequentially, etc.) accordingly to a circuit design. The collection of the molecular components can be capable of providing one or more specific outputs in a cell (e.g., regulation of one or more genes) in response to one or more inputs (e.g., a single input or a plurality of inputs). Such one or more inputs can be sufficient to trigger the molecular components of the genetic circuit to provide the one or more specific outputs. For example, the genetic circuit can comprise one or more molecular switches that are activatable by one or more inputs (FIG. 1).

[0029] A genetic circuit can be a controllable gene expression system comprising an assembly of biological parts that work together (e.g., simultaneously, sequentially, etc.) as a logical function. A genetic circuit can comprise a plurality of gate units, wherein at least one gate unit of the plurality of gate units is activatable by an activating moiety (e.g., a heterologous input to the cell) to activate other gate units of the plurality of gate units (e.g., simultaneously at once, sequentially in a cascading manner, etc.) (FIG. 1). For example, at least one gate unit of the plurality of gate units can be activatable (e.g., directly or indirectly) by another gate unit of the plurality of gate units, to (i) regulate expression or activity level of one or more target genes, (ii) activate at least one another gate unit of the plurality of gate units, and/or (ii) deactivate at least one another gate unit of the plurality of gate units, thereby collectively regulating expression and/or activity level of one or more target genes in a desired manner, as predetermined by the design of the genetic circuit (FIG. 1). The terms “heterologous genetic circuit,” “HGC,” “genetic circuit,” “cellular algorithm,” or “cellgorithm” as used herein may be used interchangeably.

[0030] The term “gate unit,” as referred to herein, generally refers to a portion of the genetic circuit that can control gene regulation by functioning similarly to a logic gate wherein it can control the flow of information and allow the circuit to multiplex decision making at different points. More specifically, the term refers to a nucleic acid encoding a genetic switch and a transcription/translation regulatory region, or series of regions, which the genetic switch acts on. The input for a gate unit can be an activating moiety and/or another gate unit. The output for a gate unit can be to activate another gate unit, to de-activate another gate unit, to affect a target gene, and/or a combination of any of the above. For example, a gate unit can be comprised of a plurality of gate moieties and/or a plurality of gene regulating moieties (FIG. 1).

[0031] The term “activating moiety,” as referred to herein, generally refers to a moiety that can activate plurality of genetic circuits and/or a plurality of gate units. An activating moiety can be a heterologous input to a cell. For example, activating moieties can include, but are not limited to, a guide nucleic acid molecule (e.g., a gRNA) or other nucleic acid, polypeptides, polynucleotides, small molecules, light, or a combination thereof.

[0032] For example, an activating moiety can be a guide nucleic acid molecule that forms a complex with an endonuclease (e.g., a Cas protein) to bind to a polynucleotide sequence of a gate moiety (e.g., a plasmid encoding another guide nucleic acid molecule) that is inactivated, to activate such gate moiety (e.g., induce expression of a functional form of the additional guide nucleic acid molecule) that can target one or more gene regulating moieties. The term “gate moiety,” as referred to herein, generally refers to a moiety that can affect the function of a gene regulating moiety within a gate unit. A gate moiety can activate and/or deactivate a gene regulating moiety. For example, a gate moiety can regulate expression of a gene regulation moiety by editing a nucleic acid sequence and thereby activating or deactivating the gene regulating moiety. For example, a gate moiety can be a guide nucleic acid molecule that forms a complex with an endonuclease (e.g., a Cas protein) to bind to a polynucleotide sequence of a gene regulating moiety (e.g., a plasmid encoding another guide nucleic acid molecule) to activate the gene regulating moiety (e.g., induce expression of a functional form of the another guide nucleic acid molecule) that can target one or more endogenous genes of a cell. Alternatively or in addition to, a gate moiety can activate and/or deactivate another gate unit of the genetic circuit (FIG. 1). For example, a gate moiety can be a guide nucleic acid molecule that forms a complex with an endonuclease (e.g., a Cas protein) to bind to a polynucleotide sequence of another gate moiety (e.g., a plasmid encoding another guide nucleic acid molecule) that is inactivated, to activate the another gate moiety (e.g., induce expression of a functional form of the another guide nucleic acid molecule). In another example, a gate moiety can be a guide nucleic acid molecule that forms a complex with an endonuclease (e.g., a Cas protein) to bind to a polynucleotide sequence of another gate moiety (e.g., a plasmid encoding another guide nucleic acid molecule) that is activated, to inactivate the another gate moiety (e.g., reduce expression of a functional form of the another guide nucleic acid molecule).

[0033] The term “gate moiety,” as referred to herein, generally refers to a moiety that can affect the function of a gene regulating moiety within a gate unit. A gate moiety can activate and/or deactivate a gene regulating moiety. For example, a gate moiety can regulate expression of a gene regulation moiety by editing a nucleic acid sequence and thereby activating or deactivating the gene regulating moiety. Alternatively or in addition to, a gate moiety can activate and/or deactivate another gate unit of the genetic circuit (FIG. 1).

[0034] The term “gene regulating moiety” or “gene editing moiety” as used interchangeably herein, generally refers to a moiety which can regulate the expression and or activity profile of a nucleic acid sequence or protein, whether exogenous or endogenous to a cell (FIG. 1). For example, a gene editing moiety can regulate expression of a gene by editing a nucleic acid sequence (e.g. CRISPR-Cas, Zinc-finger nucleases, TALENs, or siRNA). In some cases, a gene editing moiety can regulate expression of a gene by editing a genomic DNA sequence. In some cases, a gene editing moiety can regulate expression of a gene by editing an mRNA template. Editing a nucleic acid sequence can, in some cases, alter the underlying template for gene expression (e.g. CRISPR-Cas-inspired RNA targeting systems). Alternatively, a gene editing moiety can repress translation of a gene (e.g. Cas13).

[0035] Alternatively or in addition to, a gene editing moiety can be capable of regulating expression or activity of a gene by specifically binding to a target sequence operatively coupled to the gene (or a target sequence within the gene), and regulating the production of mRNA from DNA, such as chromosomal DNA or cDNA. For example, a gene editing moiety can recruit or comprise at least one transcription factor that binds to a specific DNA sequence, thereby controlling the rate of transcription of genetic information from DNA to mRNA. A gene editing moiety can itself bind to DNA and regulate transcription by physical obstruction, for example preventing proteins such as RNA polymerase and other associated proteins from assembling on a DNA template. A gene editing moiety can regulate expression of a gene at the translation level, for example, by regulating the production of protein from mRNA template. In some cases, a gene editing moiety can regulate gene expression by affecting the stability of an mRNA transcript. In some cases, a gene editing moiety can regulate a gene through epigenetic editing (e.g. Cas12).

[0036] In some cases, a plasmid can encode a non-functional form of a gene editing moiety. The plasmid can be activated (e.g., genetically modified) to express a functional form of the gene editing moiety, e.g., via activation of a functional gate moiety. For example, the plasmid can encode a non-functional form of a guide nucleic acid molecule that would otherwise be able to bind to a target gene of a cell. Upon binding of a functional gate moiety (e.g., another guide nucleic acid molecule complexed with a Cas protein) to the plasmid, the plasmid can be edited (e.g., cleaved at one or more sites, then repaired via endogenous mechanisms (e.g., homologous recombination, nonhomologous end joining) to allow expression of a functional form of the gene editing moiety (e.g., a functional form of the guide nucleic acid molecule with specific binding to the target gene of the cell), to permit modulation of the target gene in the cell.

[0037] In some cases, a gene regulating moiety can comprise a nucleic acid molecule (e.g., a guide nucleic acid molecule that forms a complex with an endonuclease, such as a Cas protein). Alternatively or in addition to, a gene regulating moiety can comprise or be operatively coupled to an endonuclease. An endonuclease can be an enzyme that cleaves a phosphodiester bond within a polynucleotide chain. An endonuclease can comprise restriction endonucleases that cleave DNA at specific sites without damaging bases. Restriction endonucleases can include Type I, Type II, Type III, and Type IV endonucleases, which can further include subtypes. In some cases, an endonuclease can be Cas1, Cas2, Cas 3, Cas4, Cas5, Cas6, Cas7, Cas8a, Cas8b, Cas8c, Cas9, Cas10, Cas10d, Cas12, Cas12a (Cpf1), Cas12b (C2c1), Cas12c (C2c3), Cas12d (CasY), Cas12e (CasX), Cas12f (Cas14 or C2c10), Cas12g, Cas12h, Cas12i, Cas12k (C2c5), Cas 13 (C2c2), Cas13b, Cas13c, Cas13d, Cas13x.1, Cse1, Cse2, Csy1, Csy2, Csy3, Csm2, Cmr5, Csx10, Csx11, Csf1, Csn2. An endonuclease can be a dead endonuclease which exhibits reduced cleavage activity. For example, an endonuclease can be a nuclease inactivated Cas such as a dCas (e.g., dCas9).

[0038] The abovementioned Cas proteins can form a complex with a guide nucleic acid (gNA (e.g., a guide RNA (gRNA)) and utilize the gNA to specifically bind to a target polynucleotide sequence (e.g., a target DNA sequence, a target RNA sequence). Accordingly, in some cases, such Cas proteins may be referred to as a “NA-guided nuclease” (e.g., RNA-guided nuclease). As used herein, the term “guide nucleic acid” (gNA) can generally refer to a nucleic acid that may hybridize to another nucleic acid. A guide nucleic acid may be RNA. A guide nucleic acid may be DNA. The guide nucleic acid may be programmed to bind to a sequence of nucleic acid site-specifically. The nucleic acid to be targeted, or the target nucleic acid, may comprise nucleotides. The guide nucleic acid may comprise nucleotides. A portion of the target nucleic acid may be complementary to a portion of the guide nucleic acid. The strand of a double-stranded target polynucleotide that is complementary to and hybridizes with the guide nucleic acid may be called the complementary strand. The strand of the double-stranded target polynucleotide that is complementary to the complementary strand, and therefore may not be complementary to the guide nucleic acid may be called noncomplementary strand. A guide nucleic acid may comprise a polynucleotide chain and can be called a “single guide nucleic acid.” A guide nucleic acid may comprise two polynucleotide chains and may be called a “double guide nucleic acid.” If not otherwise specified, the term “guide nucleic acid” may be inclusive, referring to both single guide nucleic acids and double guide nucleic acids. A guide nucleic acid may comprise a segment that can be referred to as a “nucleic acid-targeting segment” or a “nucleic acid-targeting sequence” or “spacer sequence”. A nucleic acid-targeting segment may comprise a sub-segment that may be referred to as a “protein binding segment” or “protein binding sequence” or “Cas protein binding segment” or “scaffold sequence.”

[0039] A gene regulating moiety can be a transcriptional modulator system (e.g., a gene repressor complex or a gene activator complex). For example, a gene regulating moiety can be a gene repressor complex comprising a dCas protein operatively coupled to (e.g., coupled to or fused with) a transcriptional repressor. Non-limiting examples of transcriptional repressors can include KRAB, SID, MBD2, MBD3, DNMT1, DNMT2A, DNMT3A, DNMT3B, DNMT3L, Mecp2, FOG1, ROM2, LSD1, ERD, SRDX repression domain, Pr-SET7/8, SUV4-20H1, RIZ1, JMJD2A, JHDM3A, JMJD2B, JMJD2C, GASC1, JMJD2D, JARID1A, RBP2, JARID1B/PLU-1, JARIDIC/SMCX, JARIDID/SMCY, HDAC1, HDAC2, HDAC3, HDAC8, HDAC4, HDAC5, HDAC7, HDAC9, SIRT1, SIRT2, HDACl1, M.Hhal, METI, DRM3, ZMET2, CMT1, CMT2, Lamin A, and Lamin B. Alternatively, a gene regulating moiety can be a gene activator complex comprising a dCas protein operatively coupled to (e.g., fused to) a transcriptional activator. Non-limiting examples of transcriptional activators can include VP16, VP64, VP48, VP160, p65 subdomain, SET1A, SET1B, MLL1, MLL2, MLL3, MLL4, MLL5, ASH1, SYMD2, NSD1, JHDM2a, JHDM2b, UTX, JMJD3, GCN5, PCAF, CBP, p300, TAF1, TIP60/PLIP, MOZ/MYST3, MORF/MYST4, SRC1, ACTR, P160, CLOCK, TET1CD, TET1, DME, DML1, DML2, and ROS1.

[0040] In some cases, the gene regulating moiety has enzymatic activity that modifies the target gene without cleaving the target gene. Modification of the target gene can cause, for example, epigenetic modifications that can modify gene expression and/or activity level. Examples of enzymatic activity that can be provided by a gene regulating moiety can include but are not limited to: nuclease activity such as that provided by a restriction enzyme (e.g., Fokl nuclease), methyltransferase activity such as that provided by a methyltransferase (e.g., Hhal DNA m5c-methyltransferase (M.Hhal), DNA methyltransferase 1 (DNMT1), DNA methyltransferase 3a (DNMT3a), DNA methyltransferase 3b (DNMT3b), METI, DRM3, ZMET2, CMT1, CMT2; demethylase activity such as that provided by a demethylase (e.g., Ten-Eleven Translocation (TET) dioxygenase 1 (TET1CD), TET1, DME, DML1, DML2, ROS 1), DNA repair activity, DNA damage activity, deamination activity such as that provided by a deaminase (e.g., a cytosine deaminase enzyme such as APOBEC1), dismutase activity, alkylation activity, depurination activity, oxidation activity, pyrimidine dimer forming activity, integrase activity such as that provided by an integrase and/or resolvase (e.g., Gin invertase such as the hyperactive mutant of the Gin invertase, GinH106Y; human immunodeficiency virus type 1 integrase (IN); Tn3 resolvase; and the like), transposase activity, recombinase activity such as that provided by a recombinase (e.g., catalytic domain of Gin recombinase), polymerase activity, ligase activity, helicase activity, photolyase activity, and glycosylase activity.

[0041] A gene regulating moiety can comprise an endonuclease. An endonuclease can be an enzyme that cleaves a phosphodiester bond within a polynucleotide chain. An endonuclease can comprise restriction endonucleases that cleave DNA at specific sites without damaging bases. Restriction endonucleases can include Type I, Type II, Type III, and Type IV endonucleases, which can further include subtypes. In some cases, an endonuclease can be Cas9. In some cases, an endonuclease can be a deactivated Cas (e.g., dCas, dCas9).

[0042] Unless specifically stated or obvious from context, the term “polynucleotide,” “oligonucleotide,” or “nucleic acid,” as used interchangeably herein, generally refers to a polymeric form of nucleotides of any length, either deoxyribonucleotides or ribonucleotides, or analogs thereof, either in single-, double-, or multi-stranded form. A polynucleotide can be exogenous or endogenous to a cell. A polynucleotide can exist in a cell-free environment. A polynucleotide can be a gene or fragment thereof. A polynucleotide can be DNA. A polynucleotide can be RNA. A polynucleotide can have any three-dimensional structure, and can perform any function, known or unknown. A polynucleotide can comprise one or more analogs (e.g. altered backbone, sugar, or nucleobase). If present, modifications to the nucleotide structure can be imparted before or after assembly of the polymer. Some non-limiting examples of analogs include: 5-bromouracil, peptide nucleic acid, xeno nucleic acid, morpholinos, locked nucleic acids, glycol nucleic acids, threose nucleic acids, dideoxynucleotides, cordycepin, 7-deaza-GTP, fluorophores (e.g. rhodamine or fluorescein linked to the sugar), thiol containing nucleotides, biotin linked nucleotides, fluorescent base analogs, CpG islands, methyl-7-guanosine, methylated nucleotides, inosine, thiouridine, pseudouridine, dihydrouridine, queuosine, and wyosine. Non-limiting examples of polynucleotides include coding or non-coding regions of a gene or gene fragment, loci (locus) defined from linkage analysis, exons, introns, messenger RNA (mRNA), transfer RNA (tRNA), ribosomal RNA (rRNA), short interfering RNA (siRNA), short-hairpin RNA (shRNA), micro-RNA (miRNA), ribozymes, cDNA, recombinant polynucleotides, branched polynucleotides, plasmids, vectors, isolated DNA of any sequence, isolated RNA of any sequence, cell-free polynucleotides including cell-free DNA (cfDNA) and cell-free RNA (cfRNA), nucleic acid probes, and primers. The sequence of nucleotides can be interrupted by non-nucleotide components.

[0043] The term “gene” generally refers to a nucleic acid (e.g., DNA such as genomic DNA and cDNA) and its corresponding nucleotide sequence that is involved in encoding an RNA transcript. The term as used herein with reference to genomic DNA includes intervening, non-coding regions as well as regulatory regions and can include 5′ and 3′ ends. In some uses, the term encompasses the transcribed sequences, including 5′ and 3′ untranslated regions (5′-UTR and 3′-UTR), exons and introns. In some genes, the transcribed region will contain “open reading frames” that encode polypeptides. In some uses of the term, a “gene” comprises only the coding sequences (e.g., an “open reading frame” or “coding region”) necessary for encoding a polypeptide. In some cases, genes do not encode a polypeptide, for example, ribosomal RNA genes (rRNA) and transfer RNA (tRNA) genes. In some cases, the term “gene” includes not only the transcribed sequences, but in addition, also includes non-transcribed regions including upstream and downstream regulatory regions, enhancers and promoters. A gene can refer to an “endogenous gene” or a native gene in its natural location in the genome of an organism. A gene can refer to an “exogenous gene” or a non-native gene. A non-native gene can refer to a gene not normally found in the host organism, but which is introduced into the host organism by gene transfer. A non-native gene can also refer to a gene not in its natural location in the genome of an organism. A non-native gene can also refer to a naturally occurring nucleic acid or polypeptide sequence that comprises mutations, insertions and/or deletions (e.g., non-native sequence).

[0044] The term “sequence identity” generally refers to an exact nucleotide-to-nucleotide or amino acid-to-amino acid correspondence of two polynucleotides or polypeptide sequences, respectively. Typically, techniques for determining sequence identity include determining the nucleotide sequence of a polynucleotide and/or determining the amino acid sequence encoded thereby, and comparing these sequences to a second nucleotide or amino acid sequence. Two or more sequences (polynucleotide or amino acid) can be compared by determining their “percent identity.” The percent identity of two sequences, whether nucleic acid or amino acid sequences, is the number of exact matches between two aligned sequences divided by the length of the longer sequence and multiplied by 100. Percent identity may also be determined, for example, by comparing sequence information using the advanced BLAST computer program, including version 2.2.9, available from the National Institutes of Health. The BLAST program is based on the alignment method of Karlin and Altschul, Proc. Natl. Acad. Sci. USA, 87:2264-2268 (1990) and as discussed in Altschul, et al., J. Mol. Biol., 215:403-410 (1990); Karlin And Altschul, Proc. Natl. Acad. Sci. USA, 90:5873-5877 (1993); and Altschul et al., Nucleic Acids Res., 25:3389-3402 (1997). The program may be used to determine percent identity over the entire length of the proteins being compared. Default parameters are provided to optimize searches with short query sequences in, for example, with the blastp program. The program also allows use of an SEG filter to mask-off segments of the query sequences as determined by the SEG program of Wootton and Federhen, Computers and Chemistry 17:149-163 (1993). Ranges of desired degrees of sequence identity are approximately 50% to 100% and integer values therebetween. In general, this disclosure encompasses sequences with at least 50%, at least 55%, at least 60%, at least 65%, at least 70%, at least 75%, at least 80%, at least 85%, at least 90%, at least 95%, or at least 98% sequence identity with any sequence provided herein.

[0045] The term “expression” generally refers to one or more processes by which a polynucleotide is transcribed from a DNA template (such as into an mRNA or other RNA transcript) and/or the process by which a transcribed mRNA is subsequently translated into peptides, polypeptides, or proteins. Transcripts and encoded polypeptides can be collectively referred to as “gene product.” If the polynucleotide is derived from genomic DNA, expression can include splicing of the mRNA in a eukaryotic cell. “Up-regulated,” with reference to expression, generally refers to an increased expression level of a polynucleotide (e.g., RNA such as mRNA) and/or polypeptide sequence relative to its expression level in a wild-type state while “down-regulated” generally refers to a decreased expression level of a polynucleotide (e.g., RNA such as mRNA) and/or polypeptide sequence relative to its expression in a wild-type state. Expression of a transfected gene can occur transiently or stably in a cell. During “transient expression” the transfected gene is not transferred to the daughter cell during cell division. Since its expression is restricted to the transfected cell, expression of the gene is lost over time. During transient expression, episomal DNA can be transferred to daughter cells, but since episomal DNA is not replicated, it is not permanently heritable and will dilute out over time. In contrast, stable expression of a transfected gene can occur when the gene is co-transfected with another gene that confers a selection advantage to the transfected cell. During stable expression, plasmids can have a DNA replication element that allows them to be inherited or integrated into the genome. Such a selection advantage may be a resistance towards a certain toxin that is presented to the cell.

[0046] The term “peptide,” “polypeptide,” or “protein,” as used interchangeably herein, generally refers to a polymer of at least two amino acid residues joined by peptide bond(s). This term does not connote a specific length of polymer, nor is it intended to imply or distinguish whether the peptide is produced using recombinant techniques, chemical or enzymatic synthesis, or is naturally occurring. The terms apply to naturally occurring amino acid polymers as well as amino acid polymers comprising at least one modified amino acid. In some cases, the polymer can be interrupted by non-amino acids. The terms include amino acid chains of any length, including full length proteins, and proteins with or without secondary and/or tertiary structure (e.g., domains). The terms also encompass an amino acid polymer that has been modified, for example, by disulfide bond formation, glycosylation, lipidation, acetylation, phosphorylation, oxidation, and any other manipulation such as conjugation with a labeling component. The terms “amino acid” and “amino acids,” as used herein, generally refer to natural and non-natural amino acids, including, but not limited to, modified amino acids and amino acid analogues. Modified amino acids can include natural amino acids and non-natural amino acids, which have been chemically modified to include a group or a chemical moiety not naturally present on the amino acid. Amino acid analogues can refer to amino acid derivatives. The term “amino acid” includes both D-amino acids and L-amino acids.

[0047] The term “derivative,” “variant,” or “fragment,” as used interchangeably herein with reference to a polypeptide, generally refers to a polypeptide related to a wild type polypeptide, for example either by amino acid sequence, structure (e.g., secondary and/or tertiary), activity (e.g., enzymatic activity) and/or function. Derivatives, variants and fragments of a polypeptide can comprise one or more amino acid variations (e.g., mutations, insertions, and deletions), truncations, modifications, or combinations thereof compared to a wild type polypeptide.

[0048] The term “engineered,” “chimeric,” or “recombinant,” as used herein with respect to a polypeptide molecule (e.g., a protein), generally refers to a polypeptide molecule having a heterologous amino acid sequence or an altered amino acid sequence as a result of the application of genetic engineering techniques to nucleic acids which encode the polypeptide molecule, as well as cells or organisms which express the polypeptide molecule. The term “engineered” or “recombinant,” as used herein with respect to a polynucleotide molecule (e.g., a DNA or RNA molecule), generally refers to a polynucleotide molecule having a heterologous nucleic acid sequence or an altered nucleic acid sequence as a result of the application of genetic engineering techniques. Genetic engineering techniques include, but are not limited to, PCR and DNA cloning technologies; transfection, transformation and other gene transfer technologies; homologous recombination; site-directed mutagenesis; and gene fusion. In some cases, an engineered or recombinant polynucleotide (e.g., a genomic DNA sequence) can be modified or altered by a gene editing moiety.

[0049] Unless specifically stated or obvious from context, the term “nucleotide” as used herein, generally refers to a base-sugar-phosphate combination. A nucleotide can comprise a synthetic nucleotide. A nucleotide can comprise a synthetic nucleotide analog. Nucleotides can be monomeric units of a nucleic acid sequence (e.g. deoxyribonucleic acid (DNA) and ribonucleic acid (RNA)). The term nucleotide can include ribonucleoside triphosphates adenosine triphosphate (ATP), uridine triphosphate (UTP), cytosine triphosphate (CTP), guanosine triphosphate (GTP) and deoxyribonucleoside triphosphates such as dATP, dCTP, dITP, dUTP, dGTP, dTTP, or derivatives thereof. Such derivatives can include, for example, [aS] dATP, 7-deaza-dGTP and 7-deaza-dATP, and nucleotide derivatives that confer nuclease resistance on the nucleic acid molecule containing them. The term nucleotide as used herein can refer to dideoxyribonucleoside triphosphates (ddNTPs) and their derivatives. Illustrative examples of dideoxyribonucleoside triphosphates can include, but are not limited to, ddATP, ddCTP, ddGTP, ddITP, and ddTTP. A nucleotide may be unlabeled or detectably labeled by well-known techniques. Labeling can also be carried out with quantum dots. Detectable labels can include, for example, radioactive isotopes, fluorescent labels, chemiluminescent labels, bioluminescent labels and enzyme labels. Fluorescent labels of nucleotides may include but are not limited fluorescein, 5-carboxyfluorescein (FAM), 2′7′-dimethoxy-4′5-dichloro-6-carboxyfluorescein (JOE), rhodamine, 6-carboxyrhodamine (R6G), N,N,N′,N′-tetramethyl-6-carboxyrhodamine (TAMRA), 6-carboxy-X-rhodamine (ROX), 4-(4′dimethylaminophenylazo) benzoic acid (DABCYL), Cascade Blue, Oregon Green, Texas Red, Cyanine and 5-(2′-aminoethyl) aminonaphthalene-1-sulfonic acid (EDANS). Specific examples of fluorescently labeled nucleotides can include [R6G] dUTP, [TAMRA] dUTP, [R110] dCTP, [R6G] dCTP, [TAMRA] dCTP, [JOE] ddATP, [R6G] ddATP, [FAM] ddCTP, [R110] ddCTP, [TAMRA] ddGTP, [ROX] ddTTP, [dR6G] ddATP, [dR110] ddCTP, [dTAMRA] ddGTP, and [dROX] ddTTP available from Perkin Elmer, Foster City, Calif. FluoroLink DeoxyNucleotides, FluoroLink Cy3-dCTP, FluoroLink Cy5-dCTP, FluoroLink Fluor X-dCTP, FluoroLink Cy3-dUTP, and FluoroLink Cy5-dUTP available from Amersham, Arlington Heights, Ill.; Fluorescein-15-dATP, Fluorescein-12-dUTP, Tetramethyl-rodamine-6-dUTP, IR770-9-dATP, Fluorescein-12-ddUTP, Fluorescein-12-UTP, and Fluorescein-15-2′-dATP available from Boehringer Mannheim, Indianapolis, Ind.; and Chromosome Labeled Nucleotides, BODIPY-FL-14-UTP, BODIPY-FL-4-UTP, BODIPY-TMR-14-UTP, BODIPY-TMR-14-dUTP, BODIPY-TR-14-UTP, BODIPY-TR-14-dUTP, Cascade Blue-7-UTP, Cascade Blue-7-dUTP, fluorescein-12-UTP, fluorescein-12-dUTP, Oregon Green 488-5-dUTP, Rhodamine Green-5-UTP, Rhodamine Green-5-dUTP, tetramethylrhodamine-6-UTP, tetramethylrhodamine-6-dUTP, Texas Red-5-UTP, Texas Red-5-dUTP, and Texas Red-12-dUTP available from Molecular Probes, Eugene, Oreg. Nucleotides can also be labeled or marked by chemical modification. A chemically modified single nucleotide can be biotin-dNTP. Some non-limiting examples of biotinylated dNTPs can include, biotin-dATP (e.g., bio-N6-ddATP, biotin-14-dATP), biotin-dCTP (e.g., biotin-11-dCTP, biotin-14-dCTP), and biotin-dUTP (e.g. biotin-11-dUTP, biotin-16-dUTP, biotin-20-dUTP).

[0050] The term “cell” generally refers to a biological cell. A cell can be the basic structural, functional and/or biological unit of a living organism. A cell can originate from any organism having one or more cells. Some non-limiting examples include: a prokaryotic cell, eukaryotic cell, a bacterial cell, an archaeal cell, a cell of a single-cell eukaryotic organism, a protozoa cell, a cell from a plant (e.g. cells from plant crops, fruits, vegetables, grains, soy bean, corn, maize, wheat, seeds, tomatoes, rice, cassava, sugarcane, pumpkin, hay, potatoes, cotton, cannabis, tobacco, flowering plants, conifers, gymnosperms, ferns, clubmosses, hornworts, liverworts, mosses), an algal cell, (e.g., Botryococcus braunii, Chlamydomonas reinhardtii, Nannochloropsis gaditana, Chlorella pyrenoidosa, Sargassum patens, C. agardh, and the like), seaweeds (e.g. kelp), a fungal cell (e.g., a yeast cell, a cell from a mushroom), an animal cell, a cell from an invertebrate animal (e.g. fruit fly, cnidarian, echinoderm, nematode, etc.), a cell from a vertebrate animal (e.g., fish, amphibian, reptile, bird, mammal), a cell from a mammal (e.g., a pig, a cow, a goat, a sheep, a rodent, a rat, a mouse, a non-human primate, a human, etc.), and etcetera. Sometimes a cell is not originating from a natural organism (e.g., a cell can be a synthetically made, sometimes termed an artificial cell).

[0051] The term “differentiation” generally refers to a process by which an unspecialized (“uncommitted”) or less specialized cell acquires the features of a specialized cell such as, e.g., an immune cell. A differentiated or differentiation-induced cell is one that has taken on a more specialized (“committed”) position within the lineage of a cell. The term “committed” generally refers to a cell that has proceeded in the differentiation pathway to a point where, under normal circumstances, it will continue to differentiate into a specific cell type or subset of cell types, and cannot, under normal circumstances, differentiate into a different cell type or revert to a less differentiated cell type.

[0052] The term “dedifferentiation” or “de-differentiation” generally refers to a process by which a specialized, committed, or partially specialized cell loses the features of the specialized cell (e.g., a chondrogenic cell). A dedifferentiated cell or dedifferentiation-induced cell is one that has taken on a less specialized position within the lineage of a cell (e.g., a stem cell or a progenitor cell). A dedifferentiated cell (e.g., a stem cell or a progenitor cell) can subsequently differentiate into a different cell type or can revert to a less differentiated cell type.

[0053] The term “pluripotent” generally refers to the ability of a cell to form all lineages of the body or soma (e.g., the embryo proper). For example, embryonic stem cells are a type of pluripotent stem cells that are able to form cells from each of the three germs layers, the ectoderm, the mesoderm, and the endoderm. Pluripotency can be a continuum of developmental potencies ranging from the incompletely or partially pluripotent cell (e.g., an epiblast stem cell), which is unable to give rise to a complete organism to the more primitive, more pluripotent cell, which is able to give rise to a complete organism (e.g., an embryonic stem cell).

[0054] The term “induced pluripotent stem cells” (iPSCs) generally refers to stem cells that are derived from differentiated cells (e.g., differentiated adult, neonatal, or fetal cells) that have been induced or changed (e.g., reprogrammed) into cells capable of differentiating into tissues of all three germ or dermal layers: mesoderm, endoderm, and ectoderm. The iPSCs produced do not refer to cells as they are found in nature. In some cases, iPSCs can be engineered to differentiation directly into committed cells (e.g., chondrogenic cells). In some cases, iPSCs can be engineered to differentiate first into tissue-specific stem cells (e.g., mesenchymal stem cells, chondroprogenitor cells), which can be further induced to differentiate into committed cells (e.g., chondrogenic cells).

[0055] The term “embryonic stem cell” (ESCs) generally refers to cells derived from the naturally occurring pluripotent stem cells of the inner cell mass of the embryonic blastocyst. Embryonic stem cells are pluripotent and give rise during development to all derivatives of the three primary germ layers: ectoderm, endoderm and mesoderm. In some cases, ESCs can be engineered to differentiate directly into committed cells (e.g., chondrogenic cells). In some cases, ESCs can be engineered to differentiate first into tissue-specific stem cells (e.g., mesodermal stem cells), which can be further induced to differentiate into committed cells (e.g., chondrogenic cells).

[0056] The term “isolated stem cells” generally refers to any type of stem cells disclosed herein (e.g., ESCs, HSCs, mesenchymal or mesodermal stem cells (MSCs), etc.) that are isolated from a multicellular organism. For example, HSCs can be isolated from a mammal's body, such as a human body. In another example, an embryonic stem cells can be isolated from an embryo.

[0057] The term “isolated” generally refers to a cell or a population of cells, which has been separated from its original environment. For example, a new environment of the isolated cells is substantially free of at least one component as found in the environment in which the “un-isolated” reference cells exist. An isolated cell can be a cell that is removed from some or all components as it is found in its natural environment, for example, isolated from a tissue or biopsy sample. The term also includes a cell that is removed from at least one, some or all components as the cell is found in non-naturally occurring environments, for example, isolated form a cell culture or cell suspension. Therefore, an isolated cell is partly or completely separated from at least one component, including other substances, cells or cell populations, as it is found in nature or as it is grown, stored or subsisted in non-naturally occurring environments.

[0058] The term “chondrogenic” when applied to a cell or a population generally refers to the capacity of that cell or population to produce cartilage or to stimulate cartilage growth, under appropriate circumstances (e.g., in vivo or ex vivo conditions). The term “chondrogenic cell” generally refers to a cell that comprises tissue that produces cartilage or cartilage-related proteins. Non-limiting examples of chondrogenic cells are chondroblasts, chondrocytes, and cells which themselves differentiate into chondroblasts or chondrocytes, such as chondrogenic precursor cells. Chondrogenic cells develop from mesodermal stem cells (MSCs), including but not limited to paraxial mesoderm cells, sclerotome cells, and chondroprogenitor cells.

[0059] The terms “chondroprogenitor cells,” “chondrogenic precursor cells,” or “chondrogenic progenitor cells” as used interchangeably herein generally refer to chondrogenic-specific progenitor cells that are more committed than stem cells (e.g., ESCs, MSCs, iPSCs, etc.) but less differentiated than chondroblasts or chondrocytes. Chondroprogenitor cells can be generated ex vivo by engineering isolated stem cells. Chondroprogenitor cells can be generated in vivo by engineered stem cells in vivo, e.g., by administering such stem cells with any one of the heterologous genetic circuits disclosed herein.

### Overview

[0060] Biological programming, such as cellular programming, allows for the engineering of a cell to generate a desired outcome. Outcomes of cellular programming can include inducing or prevent a wide array of common and/or new cellular functions; outcomes can also include enhancing or repressing an already-occurring cellular function. Cellular programming can be accomplished through the use of a genetic circuit. Cellular programming can be accomplished through the manipulation of biomolecules (e.g., DNA). For example, CRISPR or CRISPR/Cas systems have been adopted for genome editing across many species due to its versatility and facile programmability. Cellular programming can affect endogenous or exogenous genes. Cellular programming can be implemented to function in a time-dependent manner or a time-independent manner.

[0061] Genetic circuits used in cellular programming can be used to control the cell fate of a cell or plurality of cells by inducing differentiation or dedifferentiation and converting from one cell type to another. Cellular programming is controlled through the regulation of desired expression and/or activity levels of a plurality of genes in a cell.

[0062] Although CRISPR/Cas systems are widely used for gene editing, Cas is essentially a single-turnover nuclease as it remains bound to the double-strand break it generates, and many regions of the genome are refractory to genome editing. Increased understanding of CRISPR/Cas-based genome editing has encouraged the development of cascading regulatory systems to further harness this technology for use in engineered cellular development. By implementing a series of activatable gRNA, genome editing can be regulated from target site to target site in more of a temporal manner, sequential genome edits can be executed to function like a domino effect, and cells can be barcoded. However, this simple barcoding, often using exogenous fluorophores, doesn't allow for the regulation of endogenous genes to effect cell differentiation.

[0063] Further, differentiation or dedifferentiation of cells is currently enabled through the use of exogenous serums and growth factors which bypass the underlying machineries of a cell's programming. The use of exogenous serums, growth factors, and other similar methods results in cells that are instructed to differentiate, but which lack the concomitant underlying biology (e.g., chromatin in the correct state, etc.) This lack often results in cells that either undergo premature termination of differentiation into non-desired cell types or which undergo inefficient differentiation whereby there are low yields of target cell types, or the resulting desired differentiated cells are only semi-functional. Semi-functional cells may resemble cell types of interest, but may lack key biological features necessary for the normal function of the desired differentiated cell type.

[0064] Thus, there remains an unmet need for an activatable, CRISPR/Cas system and use of the same to edit a target polynucleotide (e.g., a genome of a cell, in particular a eukaryotic cell), using cascades of gRNAs to form genetic circuits in order to single-handedly affect gene regulation and, in turn, cell-fate determination without the use of serums and exogenous growth factors. The preprogrammed, activatable, and self-regulating gRNA cascade CRISPR/Cas system finds use, e.g., in gene therapy, genetic circuitry, and/or complex cell-fate determination and/or control.

[0065] The present disclosure provides systems and methods for engineering a CRISPR/Cas9 system, which includes a Cas endonuclease and an array of cognate single guide RNAs (sgRNA or gRNA) that harbor inactivation sequences in a non-essential region and are activatable, to allow for modulation and modification of that system without the need for serum, growth factors, or other additional exogenous signals. The present disclosure also provides for an engineered cell that can contain any of the above-mentioned systems or that can be capable of performing any of the above-mentioned methods.

### Systems and Methods for Cell Programming Towards Chondrogenic Lineage

[0066] Various aspects of the present disclosure provide systems for inducing a desired conversion from one type of cells into another type of cells. To this end, various aspects of the present disclosure provide methods for inducing a desired expression and/or activity levels (or profiles thereof) of one or more target genes in a cell.

[0067] In an aspect, the present disclosure provides for a system that converts a plurality of cells of a first type into a plurality of cells of a second cell type. The system can comprise a heterologous genetic circuit comprising a plurality of gate units. The plurality of gate units can comprise at least about 1, at least about 2, at least about 3, at least about 4, at least about 5, at least about 6, at least about 7, at least about 8, at least about 9, at least about 10, at least about 15, at least about 20, at least about 30, at least about 40, at least about 50, or more gate unit(s). The plurality of gate units can comprise at most about 50, at most about 40, at most about 30, at most about 20, at most about 15, at most about 10, at most about 9, at most about 8, at most about 7, at most about 6, at most about 5, at most about 4, at most about 3, at most about 2, or at most about 1 gate unit(s). The plurality of gate units can be different (e.g., comprising different polynucleotide sequences). Each gate unit of the plurality of gate units can affect the modulation of the expression and/or activity levels of a distinct target gene or a plurality of distinct target genes.

[0068] A heterologous genetic circuit as disclosed herein can operate with a plurality of gate units in series (e.g., the plurality of gate units are connected sequentially in an end-to-end manner forming a single path), in parallel (e.g., the plurality of gate units are connected across one another, forming, for example, two or more parallel sequential paths), or a combination thereof.

[0069] A plurality of gate units as disclosed herein can operate (e.g., as predetermined by the design of the heterologous genetic circuit) in concert to induce an outcome in a cell. The outcome in the cell can comprise cell function (e.g., movement, reproduction; response to external stimuli, nutritional output, excretion, respiration, growth) and/or cell state (e.g., cell fate, differentiation, quiescence, programmed cell death). Such outcomes can be ascertained in vitro, ex vivo, and/or in vivo. For example, an outcome as disclosed herein can be ascertained in vitro by (i) measuring expression level of a gene of interest by polymerase chain reaction (PCR) or Western blotting, (ii) staining via small molecules or antibodies, (iii) cell sorting based on cell size, morphology and/or surface protein expression, (iv) using assays (e.g. cell proliferation assays or metabolic activity assays) to measure phenotypic differentiation and cellular function, (v) microscopy, and/or (iv) screening for molecular and/or genetic differences using e.g., metabolomics, genomics, proteomics, lipidomics, epigenomics, and/or transcriptomics.

[0070] A plurality of gate units as disclosed herein can be sufficient to effect the conversion of a plurality of cells of a first cell type into a plurality of cells of a second cell type. For example, a plurality of gate units as disclosed herein can be sufficient to effect the conversion from a plurality of pluripotent stem cells (PSCs) into a plurality of tissue-specific progenitor cells. Alternatively, a plurality of gate units as disclosed herein can be necessary but insufficient to effect the conversion of a plurality of cells of a first cell type into a plurality of cells of a second cell type.

[0071] The outcome in the cell can comprise regulation of a distinct target gene or set of distinct target genes. The plurality of gate units can induce distinct modulations of the plurality of target genes (e.g., in a sequential manner), such that a collection of the modulations of the genes in concert yield a final expression and/or activity profile of the cell. The final expression and/or activity level profile of the cell can exemplify an outcome, such as a conversion of the cell from one cell type to another (or a process thereof).

[0072] In some cases, of the plurality of gate units, as disclosed herein, can be necessary but individually insufficient to effect the desired expression and/or activity profile of the target cell. Thus, the outcome in the cell (e.g., enhanced cell function, induced cell state, etc.) induced by the plurality of gate units may not be possible in absence of any one of the plurality of gate units. Alternatively, a degree or measure of the outcome in the cell induced by the plurality of gate units can be different (e.g., greater for a positive marker, or less for a negative marker) than a degree or measure of the outcome in a control cell that is induced by none, one or more, but not all of the plurality of gate units, and/or by all of the plurality gate units occurring through a different sequential order of events.

[0073] A second gate unit can be activated by a first gate unit (e.g. directly or indirectly). For example, the second gate unit can be directly activated by the first gate unit. Alternatively, the second gate unit can be activated by one or more additional gate units that are activated by the first gate unit (e.g., directly or indirectly). The one or more additional gate units can comprise at least about 1, at least about 2, at least about 3, at least about 4, at least about 5, at least about 6, at least about 7, at least about 8, at least about 9, at least about 10, at least about 15, at least about 20, at least about 30, at least about 40, at least about 50 or more gate unit(s). The one or more additional gate units at most about 50, at most about 40, at most about 30, at most about 20, at most about 15, at most about 10, at most about 9, at most about 8, at most about 7, at most about 6, at most about 5, at most about 4, at most about 3, at most about 2, or at most about 1 gate unit(s). Yet in another alternative, the second gate unit can be activated via another moiety responsible for activating the first gate unit (e.g., an activating moiety, a different gate unit, etc.). Yet in another alternative, the first gate unit and the second gate unit can be activated by different activating moieties (e.g., different polynucleotide molecules, such as different guide nucleic acid molecules).

[0074] In some cases, a first gate unit modulates a first target gene. Alternatively, or in addition to, a first gate unit can also modulate a second gate unit. The modulation of the second gate unit can occur at least or up to about 1 millisecond, about 2 milliseconds, about 3 milliseconds, about 4 milliseconds, about 5 milliseconds, about 6 milliseconds, about 7 milliseconds, about 8 milliseconds, about 9 milliseconds, about 10 milliseconds, about 20 milliseconds, about 30 milliseconds, about 40 milliseconds, about 50 milliseconds, about 60 milliseconds, about 70 milliseconds, about 80 milliseconds, about 90 milliseconds, about 100 milliseconds, about 200 milliseconds, about 300 milliseconds, about 400 milliseconds, about 500 milliseconds, about 600 milliseconds, about 700 milliseconds, about 800 milliseconds, about 900 milliseconds, about 1 second, about 2 seconds, about 3 seconds, about 4 seconds, about 5 seconds, about 6 seconds, about 7 seconds, about 8 seconds, about 9 seconds, about 10 seconds, about 15 seconds, about 20 seconds, about 30 seconds, about 40 seconds, about 50 seconds, about 1 minute, about 2 minutes, about 3 minutes, about 4 minutes, about 5 minutes, about 6 minutes, about 7 minutes, about 8 minutes, about 9 minutes, about 10 minutes, about 20 minutes, about 30 minutes, about 40 minutes, about 50 minutes, about 1 hour, about 2 hours, about 3 hours, about 4 hours, about 5 hours, about 6 hours, about 7 hours, about 8 hours, about 9 hours, about 10 hours, about 12 hours, about 16 hours, about 20 hours, about 24 hours, or more after the modulation of the first gate unit, as ascertained by rt-qPCR, Western blotting, or other methods.

[0075] In some cases, the second gate unit can modulate a second target gene. The modulation of the second target gene can occur at least or up to about 1 millisecond, about 2 milliseconds, about 3 milliseconds, about 4 milliseconds, about 5 milliseconds, about 6 milliseconds, about 7 milliseconds, about 8 milliseconds, about 9 milliseconds, about 10 milliseconds, about 20 milliseconds, about 30 milliseconds, about 40 milliseconds, about 50 milliseconds, about 60 milliseconds, about 70 milliseconds, about 80 milliseconds, about 90 milliseconds, about 100 milliseconds, about 200 milliseconds, about 300 milliseconds, about 400 milliseconds, about 500 milliseconds, about 600 milliseconds, about 700 milliseconds, about 800 milliseconds, about 900 milliseconds, about 1 second, about 2 seconds, about 3 seconds, about 4 seconds, about 5 seconds, about 6 seconds, about 7 seconds, about 8 seconds, about 9 seconds, about 10 seconds, about 15 seconds, about 20 seconds, about 30 seconds, about 40 seconds, about 50 seconds, about 1 minute, about 2 minutes, about 3 minutes, about 4 minutes, about 5 minutes, about 6 minutes, about 7 minutes, about 8 minutes, about 9 minutes, about 10 minutes, about 20 minutes, about 30 minutes, about 40 minutes, about 50 minutes, about 1 hour, about 2 hours, about 3 hours, about 4 hours, about 5 hours, about 6 hours, about 7 hours, about 8 hours, about 9 hours, about 10 hours, about 12 hours, about 16 hours, about 20 hours, about 24 hours, or more after the modulation of the first target gene, as ascertained by rt-qPCR, Western blotting, or other methods.

[0076] In some cases, the term “proGuide” as generally used herein may refer to such vector (e.g., a plasmid) that encodes the activatable gNA. The proGuide can be an example of a gate moiety. The proGuide can be an example of a gene regulating moiety.

[0077] A proGuide as provided herein can encode an activatable guide nucleic acid molecule, e.g., having the inactivation polynucleotide sequence (e.g., one or more polyX sequences, such as one or more polyT sequences). In some embodiments, a portion of the proGuide encoding the activatable guide nucleic acid molecule can comprise various regions that are sequentially linked, comprising a spacer sequence, an extra sequence (e,g, a linker sequence or a backbone sequence), an upstream stem, a poly T unit, and a downstream stem. In some embodiments, the extra sequence can exhibit at least 50%, at least 55%, at least 60%, at least 65%, at least 70%, at least 75%, at least 80%, at least 85%, at least 90%, at least 95%, at least 98%, at least 99%, or 100% sequence identity to GTTTTAGAGCTA (SEQ ID NO: 1935). In some embodiments, a portion of the proGuide encoding the activatable guide nucleic acid molecule can comprise various regions that are sequentially linked, comprising a spacer sequence, an extra sequence (e,g, a linker sequence or a backbone sequence), an upstream stem, a poly T unit, and a downstream stem, as shown in TABLE 1 (SEQ ID Nos: 1-1932). In some cases, upon modification or removal of the polyT unit, the upstream stem and the downstream stem can form a part of a scaffold sequence of a functional guide nucleic acid molecule. In some embodiments, a portion of the proGuide encoding the activatable guide nucleic acid molecule can comprise various regions that are sequentially linked, comprising a spacer sequence, an extra sequence (e,g, a linker sequence or a backbone sequence), an upstream stem, a poly T unit, and a downstream stem, as shown in TABLE 1 (SEQ ID Nos: 1-1932) as a concatenated sequence with “-” to distinguish between the various regions. In some cases, upon modification or removal of the polyT unit, the upstream stem and the downstream stem can form a part of a scaffold sequence of a functional guide nucleic acid molecule. In some embodiments, when a spacer sequence does not start with a G, a G is added before the spacer sequence. In some embodiments, the addition of the G before the spacer sequence helps increase the expression of the RNA moiety from a promotor. In some embodiments, stem 1 and stem2 are reverse complements of each other. In some embodiments, upstream stem and downstream stem are reverse complements of each other. In some embodiments, stem 1 can exhibit at least 50%, at least 55%, at least 60%, at least 65%, at least 70%, at least 75%, at least 80%, at least 85%, at least 90%, at least 95%, at least 98%, at least 99%, or 100% sequence identity to a member of the polynucleotide sequences as shown in Table 3 (SEQ ID Nos: 2024-2046). In some embodiments, stem2 can exhibit at least 50%, at least 55%, at least 60%, at least 65%, at least 70%, at least 75%, at least 80%, at least 85%, at least 90%, at least 95%, at least 98%, at least 99%, or 100% sequence identity to a member of the polynucleotide sequences as shown in Table 3 (SEQ ID Nos: 2047-2069).

[0078] In some embodiments, a proGuide as provided herein can encode an activatable guide nucleic acid molecule, e.g., having the inactivation polynucleotide sequence (e.g., one or more poly X sequences, such as one or more polyT sequences). In some cases, a portion of the proGuide encoding the activatable guide nucleic acid molecule can comprise various regions that are sequentially linked (e.g., from 5′ to 3′), comprising upstream stem (e.g., an upstream cut site), a poly T unit (or “proUnit” or “proGuide Unit” as used interchangeably herein), and a downstream stem (e.g., a downstream cut site). The upstream stem and the downstream stem may correspond to the “stem region” polynucleotide sequences that are at least partially complementary to each other.

[0079] A domain of the polynucleotide sequence that encodes (or corresponds to) the molecule of interest can comprise a polyX sequence. The polyX sequence can be sufficient to reduce expression of the molecule of interest (e.g., the guide nucleic acid molecule) from the polynucleotide sequence. For example, the polyX sequence can be disposed within the domain encoding the molecule of interest (e.g., not at either the 5′ end or the 3′ end of such domain), such that expression of the molecule of interest (e.g., transcription of an RNA molecule of interest) would be disrupted (e.g., terminated) in the middle of the expression.

[0080] Accordingly, the polyX sequence (e.g., in the polynucleotide sequence encoding the molecule of interest) may be referred to as a termination sequence (e.g., a non-canonical termination sequence for its sequence and/or its position), as a disruption sequence (e.g., for disruption of full expression of the molecule of interest), as an inactivation sequence (e.g., for inactivating function of the polynucleotide sequence or the molecule of interest).

[0081] In some cases, the non-canonical termination sequence can comprise or consist substantially of a polynucleotide sequence exhibiting at least or up to about 40%, at least or up to about 45%, at least or up to about 50%, at least or up to about 55%, at least or up to about 60%, at least or up to about 65%, at least or up to about 70%, at least or up to about 75%, at least or up to about 80%, at least or up to about 85%, at least or up to about 86%, at least or up to about 87%, at least or up to about 88%, at least or up to about 89%, at least or up to about 90%, at least or up to about 91%, at least or up to about 92%, at least or up to about 93%, at least or up to about 94%, at least or up to about 95%, at least or up to about 96%, at least or up to about 97%, at least or up to about 98%, at least or up to about 99%, or substantially about 100% sequence identity to the polynucleotide sequence of TTTTTTTTcagccaactccaaTTTTTTTT (SEQ ID NO: 1934), or a complementary sequence thereof.

[0082] In some cases, the poly X sequence can be located within (e.g., not at a terminal end) a polynucleotide sequence, such as a DNA sequence or an RNA sequence. In some cases, the poly X sequence can be located at least about 10, at least about 11, at least about 12, at least about 13, at least about 14, at least about 15, at least about 20, at least about 25, at least about 30, at least about 35, at least about 40, at least about 45, at least about 50, at least about 55, at least about 60, at least about 65, at least about 70, at least about 75, at least about 80, at least about 85, at least about 90, at least about 95, or at least about 100 bases away from the 3′ end of the polynucleotide sequence. In some cases, the poly X sequence can be located at least about 10, at least about 11, at least about 12, at least about 13, at least about 14, at least about 15, at least about 20, at least about 25, at least about 30, at least about 35, at least about 40, at least about 45, at least about 50, at least about 55, at least about 60, at least about 65, at least about 70, at least about 75, at least about 80, at least about 85, at least about 90, at least about 95, or at least about 100 bases away from the 5′ end of the polynucleotide sequence. In some cases, the polyX sequence can be located at a terminal end of a nucleic acid sequence.

[0083] In some cases, the polyT or polyU sequence can be located within (e.g., not at a terminal end) a polynucleotide sequence, such as a DNA sequence or an RNA sequence. In some cases, the polyT or polyU sequence can be located at least about 10, at least about 11, at least about 12, at least about 13, at least about 14, at least about 15, at least about 20, at least about 25, at least about 30, at least about 35, at least about 40, at least about 45, at least about 50, at least about 55, at least about 60, at least about 65, at least about 70, at least about 75, at least about 80, at least about 85, at least about 90, at least about 95, or at least about 100 bases away from the 3′ end of the polynucleotide sequence. In some cases, the polyT or polyU sequence can be located at least about 10, at least about 11, at least about 12, at least about 13, at least about 14, at least about 15, at least about 20, at least about 25, at least about 30, at least about 35, at least about 40, at least about 45, at least about 50, at least about 55, at least about 60, at least about 65, at least about 70, at least about 75, at least about 80, at least about 85, at least about 90, at least about 95, or at least about 100 bases away from the 5′ end of the polynucleotide sequence. In some cases, the polyT or polyU sequence can be located at a terminal end of a nucleic acid sequence. In some cases, an RNA which comprises a polyU sequence can also be represented by a DNA which comprises a polyT sequence.

[0084] A poly X sequence (e.g., a polyT sequence or a polyU sequence) can comprise at least about 2, at least about 3, at least about 4, at least about 5, at least about 6, at least about 7, at least about 8, at least about 9, at least about 10, at least about 11, at least about 12, at least about 13, at least about 14, at least about 15, at least about 20, at least about 30, at least about 40, at least about 50 X, at least about 60, at least about 70, at least about 80, at least about 90, or at least about 100 bases. A polyX sequence can comprise at most about 100, at most about 90, at most about 80, at most about 70, at most about 60, at most about 50, at most about 40, at most about 30, at most about 20, at most about 15, at most about 14, at most about 13, at most about 12, at most about 11, at most about 10, at most about 9, at most about 8, at most about 7, at most about 6, at most about 5, at most about 4, at most about 3, or at most about 2 X bases. A polyX sequence can be represented by a complementary poly X sequence in a corresponding complementary DNA strand (e.g., a polyT, as disclosed herein as a DNA sequence, can also be referred to as polyA in the complementary DNA strand). The polyX sequence as disclosed can comprise a plurality of X bases. The plurality of X bases can be disclosed sequentially adjacent to one another (e.g., TT, TTT, TTTT, TTTTT, etc.). Alternatively, or in addition to, the plurality of X bases can be separated by one or more additional nucleotides that are not X. The one or more additional nucleotides can comprise a single type of nucleotide or different types of nucleotides.

[0085] In some embodiments, a proGuide can comprise inactivation polynucleotide sequence that exhibits at least or up to about 50%, at least or up to about 55%, at least or up to about 60%, at least or up to about 65%, at least or up to about 70%, at least or up to about 75%, at least or up to about 80%, at least or up to about 85%, at least or up to about 86%, at least or up to about 87%, at least or up to about 88%, at least or up to about 89%, at least or up to about 90%, at least or up to about 91%, at least or up to about 92%, at least or up to about 93%, at least or up to about 94%, at least or up to about 95%, at least or up to about 96%, at least or up to about 97%, at least or up to about 98%, at least or up to about 99%, or substantially about 100% sequence identity to TTTTTTTTT or SEQ ID NO:1933, or a complementary sequence thereof.

[0086] In some embodiments, a proGuide can comprise a target polynucleotide domain at or adjacent to an inactivation polynucleotide sequence (e.g., at or adjacent to 5′ and/or 3′ ends of the inactivation polynucleotide sequences), which target polynucleotide domain can be targeted (e.g., via sequential activation mechanism of the heterologous genetic circuit as provided herein) to modify (e.g., edit, cleave) the inactivation polynucleotide sequence, thereby rendering the proGuide to express an activated guide nucleic acid molecule. The target polynucleotide domain of a proGuide may not exhibit sequence identity to any comparable endogenous polynucleotide sequence in a cell, thereby to avoid inadvertent targeting and modulation of an endogenous target gene.

[0087] In some embodiments, the inactivation polynucleotide sequence of the proGuide can be disposed between two target polynucleotide domains, which may or may not be targetable by a common guide nucleic acid sequence. In some cases, the two target polynucleotide domains can be reverse and complementary to one another, such that the inactivation polynucleotide sequence can be modified or cleaved by the same mechanism (e.g., same spacer sequence of a guide nucleic acid molecule).

[0088] In some embodiments, a proGuide can comprise a polynucleotide sequence that exhibits at least or up to about 50%, at least or up to about 55%, at least or up to about 60%, at least or up to about 65%, at least or up to about 70%, at least or up to about 75%, at least or up to about 80%, at least or up to about 85%, at least or up to about 86%, at least or up to about 87%, at least or up to about 88%, at least or up to about 89%, at least or up to about 90%, at least or up to about 91%, at least or up to about 92%, at least or up to about 93%, at least or up to about 94%, at least or up to about 95%, at least or up to about 96%, at least or up to about 97%, at least or up to about 98%, at least or up to about 99%, or substantially about 100% sequence identity to one or more members from SEQ ID NOs: 1-92 (e.g., ACAN targeting), SEQ ID NOs: 93-184 (e.g., COL2A1 targeting), SEQ ID NOs: 185-276 (e.g., MEF2D targeting), SEQ ID NOs: 277-460 (e.g., pax9 targeting), SEQ ID NOs: 461-644 (e.g., RUNX2 targeting), SEQ ID NOs: 645-920 (e.g., SOX5 targeting), SEQ ID NOs: 921-1288 (e.g., SOX6 targeting), SEQ ID NOs: 1289-1380 (e.g., SOX8 targeting), SEQ ID NOs: 1381-1472 (e.g., SOX9 targeting), SEQ ID NOs: 1473-1564 (e.g., SP1 targeting), SEQ ID NOs: 1565-1656 (e.g., TCF15 targeting), SEQ ID NOs: 1657-1748 (e.g., TCF7L2 targeting), SEQ ID NOs: 1749-1840 (e.g., TWIST1 targeting), SEQ ID NOs: 1841-1932 (e.g., UNCX targeting), or a complementary sequence thereof.

[0089] The second gate unit can be activatable to induce inactivation of the first gate unit that has been activated. The terms “inactivation” or “disruption” may be used interchangeably herein. Inactivation and as disclosed herein can be induced by generating a modification (e.g., a cleavage such as a single-strand or double-strand break, and indel, etc.) to at least a portion of the first gate unit (e.g., a gate moiety and/or a gene regulating moiety of the first gate unit) that is responsible for inducing the first distinct modulation of the target gene.

[0090] Inactivation by a gate moiety and/or a gene regulating moiety of the first gate unit as disclosed herein can be achieved through a endonuclease-based system (e.g., a CRISPR/Cas system). Alternatively, or in addition to, inactivation can be achieved through the use of a transcriptional modulator system (e.g. a transcriptional repressor). Alternatively, or in addition to, inactivation can be achieved through CRISPRi steric hindrance without the necessity of an additional transcriptional modulator. An endonuclease-transcriptional modulator system (e.g., a Cas-repressor) can be used to achieve polynucleotide cleavage (e.g. for inactivating the gate moiety and/or the gene regulating moiety). Polynucleotide cleavage can create a nucleic acid modification such as a single-strand break, a double-strand break, an insertion, a deletion, or an insertion-deletion (indel). Alternatively or in addition to, the endonuclease-transcriptional modulator system (e.g., a Cas-repressor) can be used to modulate target gene expression. Alternatively, or in addition to, a CAS transcriptional modulator system that lacks endonuclease activity (dCAS or bare CAS with a shortened spacer insufficient to support cleavage) targets to a DNA region and physically halts transcription elongation resulting in repression of the target gene (CRISPRi).

[0091] Alternatively, the second gate unit can be activatable to amplify or enhance activation of the first gate unit that has been activated. Amplification or enhancement of the first gate unit can be induced by generating a modification (e.g., a cleavage such as a single-strand or double-strand break, and indel, etc.) to at least a portion of the first gate unit (e.g., a gate moiety and/or a gene regulating moiety of the first gate unit) that is responsible for inducing the first distinct modulation of the target gene.

[0092] The heterologous genetic circuit can comprise a plurality of gate units that are sequentially activated, e.g., activated in series one after another. The plurality of gate units can comprise a functional gate unit that is preconfigured such that it is activated to regulate (e.g., directly regulate) expression and/or epigenetic profile of a target gene (e.g., an endogenous targe gene). The plurality of gate units can further comprise one or more additional gate units that are preconfigured (i) to be activated prior to the functional gate unit and (ii) to effect a subsequent activation of the functional gate unit. In some cases, the one or more additional gate units can be preconfigured to be activated to regulate one or more additional target genes. Alternatively, the one or more additional gate units may not be preconfigured to regulate any target gene (e.g., any endogenous target gene) when activated. Such one or more additional gate units may instead serve to delay (e.g., in terms of time) activation of the functional gate unit during operation of the heterologous genetic circuit, thereby delaying the expression and/or epigenetic profile of the target gene of the functional gate unit, and thus the one or more additional gate units may be referred to as “blank” gate unit(s). The heterologous genetic circuit can comprise at least or up to about 1 blank gate unit, at least or up to about 2 blank gate units, at least or up to about 3 blank gate units, at least or up to about 4 blank gate units, at least or up to about 5 blank gate units, at least or up to about 6 blank gate units, at least or up to about 7 blank gate units, at least or up to about 8 blank gate units, at least or up to about 9 blank gate units, at least or up to about 10 blank gate units, at least or up to about 11 blank gate units, at least or up to about 12 blank gate units, at least or up to about 13 blank gate units, at least or up to about 14 blank gate units, at least or up to about 15 blank gate units, at least or up to about 16 blank gate units, at least or up to about 27 blank gate units, at least or up to about 18 blank gate units, at least or up to about 19 blank gate units, at least or up to about 20 blank gate units, at least or up to about 25 blank gate units, at least or up to about 30 blank gate units, at least or up to about 35 blank gate units, at least or up to about 40 blank gate units, at least or up to about 45 blank gate units, at least or up to about 50 blank gate units.

[0093] In some cases, use of the one or more blank gate units can delay activation of the functional gate unit (e.g., as ascertained by measurement of expression/epigenetic profile of the target gene, or as ascertained by measurement of expression of a functional variant or transcribed product of the functional gate unit) by at least or up to about 1 minute, at least or up to about 5 minutes, at least or up to about 10 minutes, at least or up to about 30 minutes, at least or up to about 1 hour, at least or up to about 2 hours, at least or up to about 3 hours, at least or up to about 4 hours, at least or up to about 5 hours, at least or up to about 6 hours, at least or up to about 7 hours, at least or up to about 8 hours, at least or up to about 9 hours, at least or up to about 10 hours, at least or up to about 11 hours, at least or up to about 12 hours, at least or up to about 13 hours, at least or up to about 14 hours, at least or up to about 15 hours, at least or up to about 16 hours, at least or up to about 17 hours, at least or up to about 18 hours, at least or up to about 19 hours, at least or up to about 20 hours, at least or up to about 21 hours, at least or up to about 22 hours, at least or up to about 23 hours, at least or up to about 24 hours, at least or up to about 2 days, at least or up to about 3 days at least or up to about 4 days at least or up to about 5 days at least or up to about 6 days, or at least or up to about 7 days.

[0094] In some cases, modification of a target gene by a gate unit can inactivate a gene. For example, modification of a gene can stop expression and/or activity level of a target gene. Alternatively, modification of a gene can decrease the expression and/or activity level of a target gene. In some cases, modification of a gene can increase the expression and/or activity level of a target gene. Alternatively, modification of a gene can maintain the expression and/or activity level of a target gene.

[0095] In some cases, modification of a gene can decrease the expression and/or activity level of the target gene by at least about 0.1%, at least about 0.2%, at least about 0.3%, at least about 0.4%, at least about 0.5%, at least about 0.6%, at least about 0.7%, at least about 0.8%, at least about 0.9%, at least about 1%, at least about 2%, at least about 3%, at least about 4%, at least about 5%, at least about 6%, at least about 7%, at least about 8%, at least about 9%, at least about 10%, at least about 20%, at least about 30%, at least about 40%, at least about 50%, at least about 60%, at least about 70%, at least about 80%, at least about 90%, at least about 100%, at least about 200%, at least about 300%, at least about 400%, at least about 500%, or more. Modification of a gene can decrease in the expression and/or activity level of the target gene by at most about 500%, at most about 400%, at most about 300%, at most about 200%, at most about 100%, at most about 90%, at most about 80%, at most about 70%, at most about 60%, at most about 50%, at most about 40%, at most about 30%, at most about 20%, at most about 10%, at most about 9%, at most about 8%, at most about 7%, at most about 6%, at most about 5%, at most about 4%, at most about 3%, at most about 2%, at most about 1%, at most about 0.9%, at most about 0.8%, at most about 0.7%, at most about 0.6%, at most about 0.5%, at most about 0.4%, at most about 0.3%, at most about 0.2%, at most about 0.1%, or less.

[0096] In some cases, modification of a gene can increase the expression and/or activity level of the target gene by at least about 0.1%, at least about 0.2%, at least about 0.3%, at least about 0.4%, at least about 0.5%, at least about 0.6%, at least about 0.7%, at least about 0.8%, at least about 0.9%, at least about 1%, at least about 2%, at least about 3%, at least about 4%, at least about 5%, at least about 6%, at least about 7%, at least about 8%, at least about 9%, at least about 10%, at least about 20%, at least about 30%, at least about 40%, at least about 50%, at least about 60%, at least about 70%, at least about 80%, at least about 90%, at least about 100%, at least about 200%, at least about 300%, at least about 400%, at least about 500%, at least about 600%, at least about 700%, at least about 800%, at least about 900%, at least about 1,000%, at least about 2,000%, at least about 3,000%, at least about 4,000%, at least about 5,000%, at least about 6,000%, at least about 7,000%, at least about 8,000%, at least about 9,000%, at least about 10,000%, at least about 100,000%, at least about 1,000,000% or more. Modification of a gene can increase in the expression and/or activity level of the target gene by at most about 1,000,000%, at most about 100,000%, at most about 9,000%, at most about 8,000%, at most about 7,000%, at most about 6,000%, at most about 5,000%, at most about 4,000%, at most about 3,000%, at most about 2,000%, at most about 1,000%, at most about 900%, at most about 800%, at most about 700%, at most about 600%, at most about 500%, at most about 400%, at most about 300%, at most about 200%, at most about 100%, at most about 90%, at most about 80%, at most about 70%, at most about 60%, at most about 50%, at most about 40%, at most about 30%, at most about 20%, at most about 10%, at most about 9%, at most about 8%, at most about 7%, at most about 6%, at most about 5%, at most about 4%, at most about 3%, at most about 2%, at most about 1%, at most about 0.9%, at most about 0.8%, at most about 0.7%, at most about 0.6%, at most about 0.5%, at most about 0.4%, at most about 0.3%, at most about 0.2%, at most about 0.1%, or less.

[0097] In some cases, modification of a gene can decrease the expression and/or activity level of the target gene by at least or up to about 0.1-fold, at least or up to about 0.2-fold, at least or up to about 0.3-fold, at least or up to about 0.4-fold, at least or up to about 0.5-fold, at least or up to about 0.6-fold, at least or up to about 0.7-fold, at least or up to about 0.8-fold, at least or up to about 0.9-fold, at least or up to about 1-fold, at least or up to about 2-fold, at least or up to about 3-fold, at least or up to about 4-fold, at least or up to about 5-fold, at least or up to about 6-fold, at least or up to about 7-fold, at least or up to about 8-fold, at least or up to about 9-fold, at least or up to about 10-fold, at least or up to about 20-fold, at least or up to about 30-fold, at least or up to about 40-fold, at least or up to about 50-fold, at least or up to about 60-fold, at least or up to about 70-fold, at least or up to about 80-fold, at least or up to about 90-fold, at least or up to about 100-fold, at least or up to about 500-fold, at least or up to about 1,000-fold, at least or up to about 5,000-fold, or at least or up to about 10,000-fold, as compared to a control expression and/or activity level. Modification of a gene can decrease the expression and/or activity level of the target gene by at most or less than about 10,000-fold, at most or less than about 5,000-fold, at most or less than about 1,000-fold, at most or less than about 500-fold, at most or less than about 100-fold, at most or less than about 90-fold, at most or less than about 80-fold, at most or less than about 70-fold, at most or less than about 60-fold, at most or less than about 50-fold, at most or less than about 40-fold, at most or less than about 30-fold, at most or less than about 20-fold, at most or less than about 10-fold, at most or less than about 9-fold, at most or less than about 8-fold, at most or less than about 7-fold, at most or less than about 6-fold, at most or less than about 5-fold, at most or less than about 4-fold, at most or less than about 3-fold, at most or less than about 2-fold, at most or less than about 1-fold, at most or less than about 0.9-fold, at most or less than about 0.8-fold, at most or less than about 0.7-fold, at most or less than about 0.6-fold, at most or less than about 0.5-fold, at most or less than about 0.4-fold, at most or less than about 0.3-fold, at most or less than about 0.2-fold, at most or less than about 0.1-fold, as compared to a control expression and/or activity level.

[0098] In some cases, modification of a gene can increase the expression and/or activity level of the target gene by at least or up to about 0.1-fold, at least or up to about 0.2-fold, at least or up to about 0.3-fold, at least or up to about 0.4-fold, at least or up to about 0.5-fold, at least or up to about 0.6-fold, at least or up to about 0.7-fold, at least or up to about 0.8-fold, at least or up to about 0.9-fold, at least or up to about 1-fold, at least or up to about 2-fold, at least or up to about 3-fold, at least or up to about 4-fold, at least or up to about 5-fold, at least or up to about 6-fold, at least or up to about 7-fold, at least or up to about 8-fold, at least or up to about 9-fold, at least or up to about 10-fold, at least or up to about 20-fold, at least or up to about 30-fold, at least or up to about 40-fold, at least or up to about 50-fold, at least or up to about 60-fold, at least or up to about 70-fold, at least or up to about 80-fold, at least or up to about 90-fold, at least or up to about 100-fold, at least or up to about 500-fold, at least or up to about 1,000-fold, at least or up to about 5,000-fold, or at least or up to about 10,000-fold, as compared to a control expression and/or activity level. Modification of a gene can increase the expression and/or activity level of the target gene by at most or less than about 10,000-fold, at most or less than about 5,000-fold, at most or less than about 1,000-fold, at most or less than about 500-fold, at most or less than about 100-fold, at most or less than about 90-fold, at most or less than about 80-fold, at most or less than about 70-fold, at most or less than about 60-fold, at most or less than about 50-fold, at most or less than about 40-fold, at most or less than about 30-fold, at most or less than about 20-fold, at most or less than about 10-fold, at most or less than about 9-fold, at most or less than about 8-fold, at most or less than about 7-fold, at most or less than about 6-fold, at most or less than about 5-fold, at most or less than about 4-fold, at most or less than about 3-fold, at most or less than about 2-fold, at most or less than about 1-fold, at most or less than about 0.9-fold, at most or less than about 0.8-fold, at most or less than about 0.7-fold, at most or less than about 0.6-fold, at most or less than about 0.5-fold, at most or less than about 0.4-fold, at most or less than about 0.3-fold, at most or less than about 0.2-fold, at most or less than about 0.1-fold, as compared to a control expression and/or activity level.

[0099] An expression and/or activity profile of a gene of interest (e.g. a differentiation marker) can be compared to a control gene (e.g., a house keeping gene such as GAPDH), relative expression levels of two or more genes of interest (e.g., a ratio of expression or activity level between a stem cell marker and a differentiation marker), relative average expression levels of a gene of interest compared to average expression levels of that same gene of interest in a cell type of interest, etc.

[0100] In some cases, activation of the plurality of gate units may be a result of a single activation (e.g., by a single activating moiety at a single time point) of the heterologous genetic circuit. The plurality of gate units can comprise one of the first gate unit and the second gate that are preconfigured to be activated sequentially upon activation of the heterologous genetic circuit by the single activation. In some cases, one of the first and second gate unit can be activated by the single activating moiety (e.g., a guide nucleic acid), while the other of the first and second gate unit can be activated by an additional activating moiety (e.g., a different guide nucleic acid) that is different from the activating moiety of the heterologous genetic circuit. The additional activating moiety can be a part of the heterologous genetic circuit that is generated (e.g., expressed) only upon activation of the heterologous genetic circuit. Alternatively or in addition to, the first and second gate unit can each be activated by different activating moieties that are not the same as the activating moiety of the heterologous genetic circuit. Such different activating moieties can be parts of the heterologous genetic circuit that are generated (e.g., expressed) only upon activation of the heterologous genetic circuit.

[0101] In some embodiments of any one of the systems disclosed herein, a gate unit can comprise a gate moiety (e.g., at least or up to about 1 gate moiety, at least or up to about 2 gate moieties, at least or up to about 3 gate moieties, at least or up to about 4 gate moieties, at least or up to about 5 gate moieties, etc.) and/or a gene regulating moiety (e.g., at least or up to about 1 gene regulating moiety, at least or up to about 2 gene regulating moieties, at least or up to about 3 gene regulating moieties, at least or up to about 4 gene regulating moieties, at least or up to about 5 gene regulating moieties, at least or up to about 6 gene regulating moieties, at least or up to about 7 gene regulating moieties, at least or up to about 8 gene regulating moieties, at least or up to about 9 gene regulating moieties, at least or up to about 10 gene regulating moieties, etc.). A gate moiety as disclosed herein can comprise a guide nucleic acid molecule (gNA) (e.g., at least or up to about 1 gNA molecule, at least or up to about 2 gNA molecules, at least or up to about 3 gNA molecules, at least or up to about 4 gNA molecules, at least or up to about 5 gNA molecules, etc.). A gene regulating moiety as disclosed herein can comprise a gNA (e.g., at least or up to about 1 gNA molecule, at least or up to about 2 gNA molecules, at least or up to about 3 gNA molecules, at least or up to about 4 gNA molecules, at least or up to about 5 gNA molecules, etc.). The guide nucleic acid molecule as disclosed herein can comprise, but is not limited to, DNA, RNA, any analog of such, or any combination thereof. In some embodiments of any one of the systems disclosed herein, the gate moiety and/or the gene regulating moiety can be activatable to form a complex with an enzyme (e.g., an endonuclease and/or an exonuclease), and the complex can be configured to or capable of binding a target polynucleotide, e.g., to regulate expression and/or activity level of the target polynucleotide or another polynucleotide sequence operatively coupled to the target polynucleotide. For example, the complex can regulate expression and/or activity level of a gene comprising the target polynucleotide.

[0102] In some cases, a guide nucleic acid molecules (gNA) (e.g., a functional gNA) that is expressed by the second gate unit, upon activation, can create a modification to at least a portion of the first gate unit. For example, the activated gNA of the second gate unit can generate the modification to a polynucleotide sequence of the first gate unit that encodes a gNA (e.g., an activatable gNA) or a promoter sequence of the first gate unit that is operatively coupled to such gNA of the same first gate unit. Such modification can render the gNA of the first gate unit inoperable when expressed (e.g., reduced or inhibited specific binding to the target gene). Alternatively, the modification can reduce (e.g., inhibit) expression of the gNA of the first gate unit.

[0103] In some cases, modification of a polynucleotide sequence (e.g., as a component of a gate unit, such as a gate moiety) or a target gene can be caused by a single-stranded break wherein there is a discontinuity in one nucleotide strand. Inactivation of a polynucleotide sequence or a target gene can be caused by at least about 1, at least about 2, at least about 3, at least about 4, at least about 5, at least about 6, at least about 7, at least about 8, at least about 9, at least about 10, or more single-stranded breaks. In some cases, inactivation of a gene can be caused by at most about 10, at most about 9, at most about 8, at most about 7, at most about 6, at most about 5, at most about 4, at most about 3, at most about 2, or at most about 1 single-stranded breaks.

[0104] In some cases, a gNA can have a size (e.g., including both spacer sequence and scaffold sequence) of at least or up to about 60 nucleotides, at least or up to about 70 nucleotides, at least or up to about 80 nucleotides, at least or up to about 85 nucleotides, at least or up to about 90 nucleotides, at least or up to about 95 nucleotides, at least or up to about 100 nucleotides, at least or up to about 105 nucleotides, at least or up to about 110 nucleotides, at least or up to about 120 nucleotides, at least or up to about 130 nucleotides, at least or up to about 140 nucleotides, at least or up to about 150 nucleotides, or at least or up to about 200 nucleotides.

[0105] In some cases, a scaffold sequence of a gNA can have a size of at least or up to about 30 nucleotides, at least or up to about 35 nucleotides, at least or up to about 40 nucleotides, at least or up to about 45 nucleotides, at least or up to about 50 nucleotides, at least or up to about 55 nucleotides, at least or up to about 60 nucleotides, at least or up to about 65 nucleotides, at least or up to about 70 nucleotides, at least or up to about 75 nucleotides, at least or up to about 80 nucleotides, at least or up to about 85 nucleotides, at least or up to about 90 nucleotides, at least or up to about 95 nucleotides, at least or up to about 100 nucleotides, at least or up to about 100 nucleotides, at least or up to about 120 nucleotides, at least or up to about 130 nucleotides, at least or up to about 140 nucleotides, or at least or up to about 150 nucleotides.

[0106] In some cases, a spacer sequence of a gNA can have a size of at least or up to about 10 nucleotides, at least or up to about 11, at least or up to about 12, at least or up to about 13, at least or up to about 14, at least or up to about 15, at least or up to about 16, at least or up to about 17, at least or up to about 18, at least or up to about 19, at least or up to about 20, at least or up to about 21, at least or up to about 22, at least or up to about 23, at least or up to about 24, at least or up to about 25, at least or up to about 26, at least or up to about 27, at least or up to about 28, at least or up to about 29, or at least or up to about 30 nucleotides.

[0107] In some embodiments of any one of the systems disclosed herein, an initial (or the first) gate unit of the heterologous genetic circuit as disclosed herein may be activated (e.g., directly activated) by an activating moiety. The activating moiety can directly bind at least the portion of the initial gate unit to activate the initial gate unit, e.g., thereby to sequentially activate the heterologous genetic circuit. Alternatively, the activating moiety may activate the initial gate unit without directly binding the at least the portion of the initial gate unit (e.g., through the use of electromagnetic energy). In some cases, the initial gate unit can comprise at least one gate moiety and at least one gene regulating moiety. In some cases, the initial gate unit can comprise at least one gate moiety but may not and need not comprise a gene regulating moiety. In some cases, the initial gate unit can comprise at least one gene regulating moiety but may not and need not comprise a gate moiety (e.g., the activating moiety may be configured to activate the initiate gate unit and at least one additional gate unit).

[0108] In some embodiments of any one of the systems disclosed herein, the gNA of the gate moiety and/or the gene regulating moiety (e.g., a gNA encoded by the gate moiety and/or the gene regulating moiety) can be an activatable gNA. The activatable gNA can be one of, but not limited to, any of the following: ribonucleotides (e.g., gRNA), deoxyribonucleotides, any analog of such, or any combination thereof. In some embodiments, a vector (or expression cassette) encoding the activatable gNA can comprise an inactivation polynucleotide sequence to render the gNA inactive until activated (e.g., until the inactivation polynucleotide sequence is modified or removed from the vector. For example, the inactivation polynucleotide sequence can encode a self-cleaving polynucleotide molecule (e.g., a ribozyme). Alternatively or in addition to, the inactivation polynucleotide sequence can encode non-canonical transcription termination sequence, as described below. The inactivation polynucleotide sequence can be a part of or adjacent to a region of the vector that encodes (i) a spacer sequence of the gNA, (ii) a scaffold sequence of the gNA, and/or (ii) any linker sequence between the spacer sequence and the scaffold sequence. The vector can comprise at least or up to about 1 inactivation polynucleotide sequence, at least or up to about 2 inactivation polynucleotide sequences, at least or up to about 3 inactivation polynucleotide sequences, at least or up to about 4 inactivation polynucleotide sequences, at least or up to about 5 inactivation polynucleotide sequences, at least or up to about 6 inactivation polynucleotide sequences, at least or up to about 7 inactivation polynucleotide sequences, at least or up to about 8 inactivation polynucleotide sequences, at least or up to about 9 inactivation polynucleotide sequences, or at least or up to about 10 inactivation polynucleotide sequences.

[0109] In some cases, the term “proGuide” as generally used herein may refer to such vector (e.g., a plasmid) that encodes the activatable gNA. The proGuide can be an example of a gate moiety. The proGuide can be an example of a gene regulating moiety.

[0110] In some embodiments, the activatable gNA molecule can be a self-cleaving gNA (e.g., the gRNA contains a cis ribozyme). For example, when the activatable gNA is expressed in a cell, the activatable gNA may be self-cleavable to become non-functional (e.g., not configured to bind a target gene), unless a gene encoding the activatable gNA is modified prior to the expression of the activatable gNA. In some embodiments, the activatable gNA molecule comprises a non-canonical transcription termination sequence (e.g., a polyX sequence, such as a polyU sequence or a polyT sequence), such that a functional gNA molecule is not expressed until a gene encoding the activatable gNA having the non-canonical transcription termination sequence can be modified (e.g., to remove some or all of the transcription termination sequence). Thus, in absence of the modification of the transcription termination sequence, a non-functional variant (e.g., a non-functional fragment) of the gNA may be expressed. In some embodiments, the gNA can be synthetic. In some embodiments, the gNA can have a fluorescent label attached.

[0111] In some cases, a size of the polyT sequence is greater than or equal to a threshold length, wherein the threshold length is sufficient to reduce expression of the guide nucleic acid molecule from the polynucleotide sequence. Accordingly, a plasmid (e.g., a gate moiety or a gene regulating moiety) can encode an inactivated gNA comprising the polyT sequence that is greater than or equal to the threshold length, and editing of such plasmid to reduce the length of the polyT to below the threshold length can permit expression of the gNA in its entirety without early termination, thereby activating the gNA. In some cases, the polyT sequence comprises at least 5 T. In some cases, the polyT sequence comprises at least 7 T. In some cases, the polyT sequence comprises at least 8 T. In some cases, the polyT sequence comprises at least 10 T. In some cases, the polyT sequence comprises between 5 T and 15 T. In some cases, the polyT sequence comprises one or more additional nucleotides that are not T.

[0112] In some cases, a gene regulating moiety (e.g., a guide nucleic acid and/or an endonuclease) can be configured to bind to a target polynucleotide sequence operatively coupled to a target gene in a cell. The target gene can comprise an encoding polynucleotide sequence that encodes a target nucleic acid molecule or a target protein. The target polynucleotide sequence can be a part of the encoding polynucleotide sequence. Alternatively, the target polynucleotide sequence may not be a part of the encoding polynucleotide sequence. For example, the target polynucleotide sequence can be upstream of the encoding polynucleotide sequence (e.g., part of a promoter of the encoding polynucleotide sequence, such as a transcription start site (TSS).

[0113] As provided herein, when the heterologous genetic circuit is activated to induce a plurality of distinct modulations of a target gene, as provided herein, the plurality of distinct modulations of the target gene can be different (e.g., different degrees of change in the expression and/or activity level of the target gene. For example, a first modulation exerted by a first gene unit and second modulation exerted by a second gate unit can be different by at least about 0.1%, at least about 0.2%, at least about 0.3%, at least about 0.4%, at least about 0.5%, at least about 0.6%, at least about 0.7%, at least about 0.8%, at least about 0.9%, at least about 1%, at least about 2%, at least about 3%, at least about 4%, at least about 5%, at least about 6%, at least about 7%, at least about 8%, at least about 9%, at least about 10%, at least about 20%, at least about 30%, at least about 40%, at least about 50%, at least about 60%, at least about 70%, at least about 80%, at least about 90%, at least about 100%, at least about 200%, at least about 300%, at least about 400%, or at least about 500%. The first modulation and the second modulation can be different by at most about 500%, at most about 400%, at most about 300%, at most about 200%, at most about 100%, at most about 90%, at most about 80%, at most about 70%, at most about 60%, at most about 50%, at most about 40%, at most about 30%, at most about 20%, at most about 10%, at most about 9%, at most about 8%, at most about 7%, at most about 6%, at most about 5%, at most about 4%, at most about 3%, at most about 2%, at most about 1%, at most about 0.9%, at most about 0.8%, at most about 0.7%, at most about 0.6%, at most about 0.5%, at most about 0.4%, at most about 0.3%, at most about 0.2%, or at most about 0.1%. Alternatively or in addition to, the distinct modulation of the target gene can be substantially the same (e.g., the same). The plurality of distinct modulations can be individually sufficient to induce the desired change in expression and/or activity level of the target gene. Alternatively, the distinct modulations can be individually insufficient to induce the desired change in expression and/or activity level of the target gene.

[0114] One or more target genes as disclosed herein can comprise one or more endogenous genes (e.g., genomic DNA, mRNA, mitochondrial DNA, etc.), exogenous genes, transgenes, or a combination thereof.

[0115] In some cases, a guide nucleic acid molecules (gNA) (e.g., a functional gNA) that is expressed by the second gate unit, upon activation, can create a modification to at least a portion of the first gate unit. For example, the activated gNA of the second gate unit can generate the modification to a polynucleotide sequence of the first gate unit that encodes a gNA (e.g., an activatable gNA) or a promoter sequence of the first gate unit that is operatively coupled to such gNA of the same first gate unit. Such modification can render the gNA of the first gate unit inoperable when expressed (e.g., reduced or inhibited specific binding to the target gene). Alternatively, the modification can reduce (e.g., inhibit) expression of the gNA of the first gate unit.

[0116] In some embodiments of any one of the systems disclosed herein, an initial (or the first) gate unit of the heterologous genetic circuit as disclosed herein may be activated (e.g., directly activated) by an activating moiety. The activating moiety can directly bind at least the portion of the initial gate unit to activate the initial gate unit, e.g., thereby to sequentially activate the heterologous genetic circuit. Alternatively, the activating moiety may activate the initial gate unit without directly binding the at least the portion of the initial gate unit (e.g., through the use of electromagnetic energy). In some cases, the initial gate unit can comprise at least one gate moiety and at least one gene regulating moiety. In some cases, the initial gate unit can comprise at least one gate moiety but may not and need not comprise a gene regulating moiety. In some cases, the initial gate unit can comprise at least one gene regulating moiety but may not and need not comprise a gate moiety (e.g., the activating moiety may be configured to activate the initiate gate unit and at least one additional gate unit).

[0117] In some embodiments of any one of the systems disclosed herein, the gNA of the gate moiety and/or the gene regulating moiety (e.g., a gNA encoded by the gate moiety and/or the gene regulating moiety) can be an activatable gNA. The activatable gNA can be one of, but not limited to, any of the following: ribonucleotides (e.g., gRNA), deoxyribonucleotides, any analog of such, or any combination thereof. In some embodiments, the activatable gNA molecule can be a self-cleaving gNA (e.g., the gRNA contains a cis ribozyme). For example, when the activatable gNA is expressed in a cell, the activatable gNA may be self-cleavable to become non-functional (e.g., not configured to bind a target gene), unless a gene encoding the activatable gNA is modified prior to the expression of the activatable gNA. In some embodiments, the gNA can be synthetic. In some embodiments, the gNA can have a fluorescent label attached.

[0118] In some cases, a guide nucleic acid molecules (gNA) (e.g., a functional gNA) that is expressed by the second gate unit, upon activation, can create a modification to at least a portion of the first gate unit. For example, the activated gNA of the second gate unit can generate the modification to a polynucleotide sequence of the first gate unit that encodes a gNA (e.g., an activatable gNA) or a promoter sequence of the first gate unit that is operatively coupled to such gNA of the same first gate unit. Such modification can render the gNA of the first gate unit inoperable when expressed (e.g., reduced or inhibited specific binding to the target gene). Alternatively, the modification can reduce (e.g., inhibit) expression of the gNA of the first gate unit.

[0119] In some cases, modification of a polynucleotide sequence (e.g., as a component of a gate unit, such as a gate moiety) or a target gene can be caused by a single-stranded break wherein there is a discontinuity in one nucleotide strand. Inactivation of a polynucleotide sequence or a target gene can be caused by at least about 1, at least about 2, at least about 3, at least about 4, at least about 5, at least about 6, at least about 7, at least about 8, at least about 9, at least about 10, or more single-stranded breaks. In some cases, inactivation of a gene can be caused by at most about 10, at most about 9, at most about 8, at most about 7, at most about 6, at most about 5, at most about 4, at most about 3, at most about 2, or at most about 1 single-stranded breaks.

[0120] In some cases, a gNA can have a size (e.g., including both spacer sequence and scaffold sequence) of at least or up to about 60 nucleotides, at least or up to about 70 nucleotides, at least or up to about 80 nucleotides, at least or up to about 85 nucleotides, at least or up to about 90 nucleotides, at least or up to about 95 nucleotides, at least or up to about 100 nucleotides, at least or up to about 105 nucleotides, at least or up to about 110 nucleotides, at least or up to about 120 nucleotides, at least or up to about 130 nucleotides, at least or up to about 140 nucleotides, at least or up to about 150 nucleotides, or at least or up to about 200 nucleotides.

[0121] In some cases, a scaffold sequence of a gNA can have a size of at least or up to about 30 nucleotides, at least or up to about 35 nucleotides, at least or up to about 40 nucleotides, at least or up to about 45 nucleotides, at least or up to about 50 nucleotides, at least or up to about 55 nucleotides, at least or up to about 60 nucleotides, at least or up to about 65 nucleotides, at least or up to about 70 nucleotides, at least or up to about 75 nucleotides, at least or up to about 80 nucleotides, at least or up to about 85 nucleotides, at least or up to about 90 nucleotides, at least or up to about 95 nucleotides, at least or up to about 100 nucleotides, at least or up to about 100 nucleotides, at least or up to about 120 nucleotides, at least or up to about 130 nucleotides, at least or up to about 140 nucleotides, or at least or up to about 150 nucleotides.

[0122] In some cases, a spacer sequence of a gNA can have a size of at least or up to about 10 nucleotides, at least or up to about 11, at least or up to about 12, at least or up to about 13, at least or up to about 14, at least or up to about 15, at least or up to about 16, at least or up to about 17, at least or up to about 18, at least or up to about 19, at least or up to about 20, at least or up to about 21, at least or up to about 22, at least or up to about 23, at least or up to about 24, at least or up to about 25, at least or up to about 26, at least or up to about 27, at least or up to about 28, at least or up to about 29, or at least or up to about 30 nucleotides.

[0123] In some embodiments of any one of the systems disclosed herein, the gNA of the gate moiety and/or the gene regulating moiety (e.g., a gNA encoded by the gate moiety and/or the gene regulating moiety) can comprise a spacer sequence. In some cases, the spacer sequence can be specific to the target gene. Alternatively, the spacer sequence can be agnostic to the target gene.

[0124] As abovementioned, the length the spacer sequence of the gNA can affect the ability of the gNA to mediate Cas nuclease activity. In some cases, gNAs with spacer sequences of differing lengths can be used in the same heterologous genetic circuit to affect different types of cleavage, activation, inactivation, and/or modulation of one or more target nucleic acids. In some cases, a gNA spacer sequence that is shorter than a threshold length (e.g., about 16 nucleotides) can preclude nuclease activity of a Cas-transcriptional modulator, while still mediating DNA binding for transcriptional modulation of a target gene. In some cases, a gNA spacer sequence that is shorter than at least about 25 nucleotides, at least about 20 nucleotides, at least about 19 nucleotides, at least about 18 nucleotides, at least about 17 nucleotides, at least about 16 nucleotides, at least about 15 nucleotides, at least about 15 nucleotides, at least about 14 nucleotides, at least about 13 nucleotides, at least about 12 nucleotides, at least about 11 nucleotides, or at least about 10 nucleotides can preclude nuclease activity of a Cas protein while still mediating DNA binding.

[0125] For example, a gNA comprising a 20-nucleotide spacer sequence (e.g., a gNA encoded by a gate moiety for targeting a gene regulating moiety plasmid) can be sufficient to facilitate nuclease activity of an endonuclease (e.g., a Cas or a Cas-transcriptional modulator fusion protein) at a target polynucleotide sequence. Alternatively or in addition to, a gNA comprising a 14-nucleotide spacer sequence (e.g., a gNA encoded by a gene regulating moiety) can hybridize to DNA but may not be long enough to mediate nuclease activity—it can only facilitate endonuclease binding to the cognate DNA sequence. Accordingly, the shorter gNA can selectively allow for transcriptional modulation of a target gene though the use of a endonuclease-transcriptional modulator system (e.g. a Cas-activator system, a Cas-repressor system), without cleavage of the target gene.

[0126] In some cases, modification of a polynucleotide sequence (e.g., as a component of a gate unit, such as a gate moiety) or a target gene can be caused by a double-stranded break wherein there is a discontinuity in both nucleotide strands. In some cases, a number of such double-stranded break (e.g., necessary for such modification) can be at least or up to about 1, at least or up to about 2, at least or up to about 3, at least or up to about 4, at least or up to about 5, at least or up to about 6, at least or up to about 7, at least or up to about 8, at least or up to about 9, or at least or up to about 10.

[0127] In some cases, modification of a polynucleotide sequence (e.g., as a component of a gate unit, such as a gate moiety) or a target gene can be caused by an indel, also known as an insertion-deletion mutation. An indel mutation can comprise a frameshift or non-frameshift mutation. An indel mutation can comprise a point mutation, also called a base substitution, wherein only one base or base pair is modified. An indel mutation can comprise at least about 1, at least about 2, at least about 3, at least about 4, at least about 5, at least about 6, at least about 7, at least about 8, at least about 9, at least about 10, at least about 15, at least about 20, at least about 30, at least about 40, at least about 50, at least about 60, at least about 70, at least about 80, at least about 90, at least about 100, at least about 200, at least about 300, at least about 400, at least about 500, at least about 600, at least about 700, at least about 800, at least about 900, at least about 1000, at least about 2000, or more bases or base pairs in length. An indel mutation can comprise at most about 2000, at most about 1000, at most about 900, at most about 800, at most about 700, at most about 600, at most about 500, at most about 400, at most about 300, at most about 200, at most about 100, at most about 90, at most about 80, at most about 70, at most about 60, at most about 50, at most about 40, at most about 30, at most about 20, at most about 15, at most about 10, at most about 9, at most about 8, at most about 7, at most about 6, at most about 5, at most about 4, at most about 3, at most about 2, or at most about 1 bases or base pairs in length.

[0128] In some cases, modification of a polynucleotide sequence (e.g., as a component of a gate unit, such as a gate moiety) or a target gene can be achieved without cleavage of the polynucleotide sequence or the target gene. For example, a gene regulating moiety (e.g., a nucleic acid molecule and/or an endonuclease, such as a complex comprising a CRISPR/Cas protein and a guide nucleic acid molecule) can specifically bind to the polynucleotide sequence or the target gene, such that expression and/or activity of the polynucleotide sequence or the target gene is modified. The gene regulating moiety can comprise a transcriptional repressor or a transcriptional activator, as provided herein. Alternatively or in addition not, the gene regulating moiety can induce epigenetic modification (or epigenome modification) as provided herein.

[0129] In some cases, the modification of the polynucleotide sequence or the target gene, as provided herein, can inactivate the polynucleotide sequence or the target gene. For example, modification of the polynucleotide sequence or the target gene can repress or reduce expression and/or activity level of the polynucleotide sequence or the target gene. In some cases, the modification of the polynucleotide sequence or the target gene, as provided herein, can activate the polynucleotide sequence or the target gene. For example, modification of the polynucleotide sequence or the target gene can increase expression and/or activity level of the polynucleotide sequence or the target gene.

[0130] In some cases, the modification of the polynucleotide sequence or the target gene, as provided herein, can comprise decreasing the expression and/or activity level of the polynucleotide sequence or the target gene by at least or up to about 0.1%, at least or up to about 0.2%, at least or up to about 0.3%, at least or up to about 0.4%, at least or up to about 0.5%, at least or up to about 1%, at least or up to about 2%, at least or up to about 3%, at least or up to about 4%, at least or up to about 5%, at least or up to about 10%, at least or up to about 15%, at least or up to about 20%, at least or up to about 30%, at least or up to about 40%, at least or up to about 50%, at least or up to about 60%, at least or up to about 70%, at least or up to about 80%, at least or up to about 90%, at least or up to about 95%, at least or up to about 99%, or about 100% (e.g., as compared to a control that, for example, lacks the modification).

[0131] In some cases, the modification of the polynucleotide sequence or the target gene, as provided herein, can comprise decreasing the expression and/or activity level of the polynucleotide sequence or the target gene by at least or up to about 0.1-fold, at least or up to about 0.2-fold, at least or up to about 0.3-fold, at least or up to about 0.4-fold, at least or up to about 0.5-fold, at least or up to about 0.6-fold, at least or up to about 0.7-fold, at least or up to about 0.8-fold, at least or up to about 0.9-fold, at least or up to about 1-fold, at least or up to about 1.5-fold, at least or up to about 2-fold, at least or up to about 3-fold, at least or up to about 4-fold, at least or up to about 5-fold, at least or up to about 6-fold, at least or up to about 7-fold, at least or up to about 8-fold, at least or up to about 9-fold, at least or up to about 10-fold, at least or up to about 11-fold, at least or up to about 12-fold, at least or up to about 13-fold, at least or up to about 14-fold, at least or up to about 15-fold, at least or up to about 20-fold, at least or up to about 30-fold, at least or up to about 40-fold, at least or up to about 50-fold, or at least or up to about 100-fold (e.g., as compared to a control that, for example, lacks the modification).

[0132] In some cases, the modification of the polynucleotide sequence or the target gene, as provided herein, can comprise increasing the expression and/or activity level of the polynucleotide sequence or the target gene by at least or up to about 0.1%, at least or up to about 0.2%, at least or up to about 0.3%, at least or up to about 0.4%, at least or up to about 0.5%, at least or up to about 1%, at least or up to about 2%, at least or up to about 3%, at least or up to about 4%, at least or up to about 5%, at least or up to about 10%, at least or up to about 15%, at least or up to about 20%, at least or up to about 30%, at least or up to about 40%, at least or up to about 50%, at least or up to about 60%, at least or up to about 70%, at least or up to about 80%, at least or up to about 90%, at least or up to about 100%, at least or up to about 150%, at least or up to about 200%, at least or up to about 300%, at least or up to about 400%, or at least or up to about 500% (e.g., as compared to a control that, for example, lacks the modification).

[0133] In some cases, the modification of the polynucleotide sequence or the target gene, as provided herein, can comprise increasing the expression and/or activity level of the polynucleotide sequence or the target gene by at least or up to about 0.1-fold, at least or up to about 0.2-fold, at least or up to about 0.3-fold, at least or up to about 0.4-fold, at least or up to about 0.5-fold, at least or up to about 0.6-fold, at least or up to about 0.7-fold, at least or up to about 0.8-fold, at least or up to about 0.9-fold, at least or up to about 1-fold, at least or up to about 1.5-fold, at least or up to about 2-fold, at least or up to about 3-fold, at least or up to about 4-fold, at least or up to about 5-fold, at least or up to about 6-fold, at least or up to about 7-fold, at least or up to about 8-fold, at least or up to about 9-fold, at least or up to about 10-fold, at least or up to about 11-fold, at least or up to about 12-fold, at least or up to about 13-fold, at least or up to about 14-fold, at least or up to about 15-fold, at least or up to about 20-fold, at least or up to about 30-fold, at least or up to about 40-fold, at least or up to about 50-fold, at least or up to about 100-fold, at least or up to about 200-fold, at least or up to about 300-fold, at least or up to about 400-fold, at least or up to about 500-fold, or at least or up to about 1,000-fold (e.g., as compared to a control that, for example, lacks the modification).

[0134] In some embodiments of any one of the systems disclosed herein, the gNA of the gate moiety and/or the gene regulating moiety (e.g., a gNA encoded by the gate moiety and/or the gene regulating moiety) can comprise a spacer sequence. In some cases, the spacer sequence can exhibit specific binding to a target gene (e.g., an endogenous target gene). Alternatively, the spacer sequence can be agnostic to the target gene, but rather can exhibit specific binding to a target polynucleotide sequence of another gate moiety or another gene regulating moiety. Example spacer sequences can be found in Table 2 (SEQ ID Nos: 1940-2023).

[0135] Non-limiting examples of the one or more target genes can comprise ACAN, COL2A1, MEF2D, pax9, RUNX2, SOX5, SOX6, SOX8, SOX9, SP1, TCF15, TCF7L2, TWIST1, and/or UNCX. In some cases, a spacer sequence of a guide nucleic acid (e.g., a guide RNA) against a target gene as provided herein can comprise a polynucleotide sequence (e.g., a consecutive polynucleotide sequence) that exhibits at least or up to about 50%, at least or up to about 55%, at least or up to about 60%, at least or up to about 65%, at least or up to about 70%, at least or up to about 75%, at least or up to about 80%, at least or up to about 85%, at least or up to about 86%, at least or up to about 87%, at least or up to about 88%, at least or up to about 89%, at least or up to about 90%, at least or up to about 91%, at least or up to about 92%, at least or up to about 93%, at least or up to about 94%, at least or up to about 95%, at least or up to about 96%, at least or up to about 97%, at least or up to about 98%, at least or up to about 99%, or substantially about 100% sequence identity to one or more members selected from SEQ ID NOs: 1940-1943 (e.g., ACAN targeting), SEQ ID NOs: 1944-1947 (e.g., COL2A1 targeting), SEQ ID NOs: 1948-1951 (e.g., MEF2D targeting), SEQ ID NOs: 1952-1955, 1956-1959 (e.g., pax9 targeting), SEQ ID NOs: 1960-1963, 1964-1967 (e.g., RUNX2 targeting), SEQ ID NOs: 1968-1971, 1972-1975, 1976-1979 (e.g., SOX5 targeting), SEQ ID NOs: 1980-1983, 1984-1987, 1988-1991, 1992-1995 (e.g., SOX6 targeting), SEQ ID NOs: 1996-1999 (e.g., SOX8 targeting), SEQ ID NOs: 2000-2003 (e.g., SOX9 targeting), SEQ ID NOs: 2004-2007 (e.g., SP1 targeting), SEQ ID NOs: 2008-2011 (e.g., TCF15 targeting), SEQ ID NOs: 2012-2015 (e.g., TCF7L2 targeting), SEQ ID NOs: 2016-2019 (e.g., TWIST1 targeting), SEQ ID NOs: 2020-2023 (e.g., UNCX targeting), or a complementary sequence thereof. In some cases, a heterologous gene modulator as provided herein can exhibit specific binding to a target gene that comprises a polynucleotide sequence (e.g., a consecutive polynucleotide sequence) that exhibits at least or up to about 50%, at least or up to about 55%, at least or up to about 60%, at least or up to about 65%, at least or up to about 70%, at least or up to about 75%, at least or up to about 80%, at least or up to about 85%, at least or up to about 86%, at least or up to about 87%, at least or up to about 88%, at least or up to about 89%, at least or up to about 90%, at least or up to about 91%, at least or up to about 92%, at least or up to about 93%, at least or up to about 94%, at least or up to about 95%, at least or up to about 96%, at least or up to about 97%, at least or up to about 98%, at least or up to about 99%, or substantially about 100% sequence identity to one or more members selected from SEQ ID NOs: 1940-1943_(e.g., ACAN targeting), SEQ ID NOs: 1944-1947 (e.g., COL2A1 targeting), SEQ ID NOs: 1948-1951 (e.g., MEF2D targeting), SEQ ID NOs: 1952-1955, 1956-1959 (e.g., pax9 targeting), SEQ ID NOs: 1960-1963, 1964-1967 (e.g., RUNX2 targeting), SEQ ID NOs: 1968-1971, 1972-1975, 1976-1979 (e.g., SOX5 targeting), SEQ ID NOs: 1980-1983, 1984-1987, 1988-1991, 1992-1995 (e.g., SOX6 targeting), SEQ ID NOs: 1996-1999 (e.g., SOX8 targeting), SEQ ID NOs: 2000-2003 (e.g., SOX9 targeting), SEQ ID NOs: 2004-2007 (e.g., SP1 targeting), SEQ ID NOs: 2008-2011 (e.g., TCF15 targeting), SEQ ID NOs: 2012-2015 (e.g., TCF7L2 targeting), SEQ ID NOs: 2016-2019 (e.g., TWIST1 targeting), SEQ ID NOs: 2020-2023 (e.g., UNCX targeting), or a complementary sequence thereof (e.g., with uracil-to-thymine conversion).

[0136] The gene regulating moiety as disclosed herein can comprise an endonuclease, such as a CRISPR-Cas protein exhibiting at least a portion of its nuclease activity. For example, the nuclease activity can be utilized to activate expression or activity of a guide nucleic acid molecule, thereby to activate at least a portion of the heterologous genetic circuit as described herein.

[0137] The gene regulating moiety as disclosed herein can comprise an endonuclease that is operatively coupled to a transcriptional effector, including a transcriptional activator or a transcriptional repressor, that is heterologous to the cell. The endonuclease may be naturally or may be engineered to exhibit reduced nuclease activity (or substantially no nuclease activity), such that the endonuclease can be used to specifically bind to a target gene, but without cleaving the target gene (e.g., endogenous gene, such as TBX, bHLH, SOX, collagen, etc.). In some cases, the nuclease can be a deactivated Cas (dCas). Instead, once the endonuclease identifies and binds the target gene, the transcriptional effector that is coupled (e.g., covalently or non-covalently coupled) to the endonuclease can interact with the target gene to either increase or decrease the expression level of the target gene, thereby either increasing or decreasing the activity level of the target gene. For example, the endonuclease and the transcriptional effector can be part of a fusion protein that is encoded by the same expression cassette.

[0138] FIG. 10 schematically illustrates use of the heterologous genetic circuit in conjunction with an endonuclease-transcriptional effector fusion (e.g., CRISPR Cas-transcriptional activator, such as Cas9-VPR). Each gate moiety can be a modified self-deactivating (e.g., self-destructing) guide RNA, which would be configured to form a complex with the CRISPR Cas-transcriptional effector fusion if not deactivated. The initial activating moiety (denoted as activating guide RNA or “aGuide”) can convert the first gate moiety to an activated guide RNA (denoted as a matureGuide). Each matureGuide can target an additional gene regulating moiety encoding an activatable guide RNA against a target gene (denoted as ramGuide), to activate such ranGuide. Subsequently, the activated ramGuide can form a complex with the CRISPR Cas-transcriptional effector fusion protein to bind the target gene and regulate expression level of the target gene. The activated matureGuide can also target an additional gate moiety that is downstream within the heterologous genetic circuit's signaling cascade, to subsequently regulate expression of one or more additional genes.

[0139] In some embodiments, the transcriptional effector can be a histone epigenetic modifier (or a histone modifier). In some cases, the histone epigenetic modifier can modulate histones through methylation (e.g., a histone methylation modifier, such as an amino acid methyltransferase, e.g., KRAB). In some cases, the histone epigenetic modifier can modulate histones through acetylation. In some cases, the histone epigenetic modifier can modulate histones through phosphorylation. In some cases, the histone epigenetic modifier can modulate histones through ADP-ribosylation. In some cases, the histone epigenetic modifier can modulate histones through glycosylation. In some cases, the histone epigenetic modifier can modulate histones through SUMOylation. In some cases, the histone epigenetic modifier can modulate histones through ubiquitination. In some cases, the histone epigenetic modifier can modulate histones by remodeling histone structure, e.g., via an ATP hydrolysis-dependent process.

[0140] In some embodiments, the transcriptional effector can be a gene epigenetic modifier (or a gene modifier). In some cases, a gene modifier can modulate genes through methylation (e.g., a gene methylation modifier, such as a DNA methyltransferase or DNMT). In some cases, a gene modifier can modulate genes through acetylation.

[0141] In some embodiments, the transcriptional effector can be derived from a family of related histone acetyltransferases. Non-limiting examples of histone acetyltransferases include GNAT subfamily, MYST subfamily, p300/CBP subfamily, HAT1 subfamily, GCN5, PCAF, Tip60, MOZ, MORF, MOF, HBO1, p300, CBP, HAT1, ATF-2, SRC1, and TAFII250.

[0142] In some embodiments, the transcriptional effector can be derived from a histone lysine methyltransferase. Non-limiting examples of histone lysine methyltransferases include EZH subfamily, Non-SET subfamily, Other SET subfamily, PRDM subfamily, SET1 subfamily, SET2 subfamily, SUV39 subfamily, SYMD subfamily, ASH1L, EHMT1, EHMT2, EZH1, EZH2, MLL, MLL2, MLL3, MLL4, MLL5, NSD1, NSD2, NSD3, PRDM1, PRDM10, PRDM11, PRDM12, PRDM13, PRDM14, PRDM15, PRDM16, PRDM2, PRDM4, PRDM5, PRDM6, PRDM7, PRDM8, PRDM9, SET1, SET1L, SET2L, SETD2, SETD3, SETD4, SETD5, SETD6, SETD7, SETD8, SETDB1, SETDB2, SETMAR, SUV39H1, SUV39H2, SUV420H1, SUV420H2, SYMD1, SYMD2, SYMD3, SYMD4, and SYMD5.

[0143] Non-limiting examples of the transcriptional effector that enhances expression or activity of the target gene can include, but are not limited to, transcriptional activators such as VP16, VP64, VP48, VP160, p65 subdomain (e.g., from NFkB), vp64-p65-rta fusion protein (VPR), and activation domain of EDLL and/or TAL activation domain (e.g., for activity in plants); histone lysine methyltransferases such as SET1A, SET1B, MLL1 to 5, ASH1, SYMD2, NSD1; histone lysine demethylases such as JHDM2a/b, UTX, JMJD3; histone acetyltransferases such as GCN5, PCAF, CBP, p300, TAF1, TIP60/PLIP, MOZMYST3, MORFMYST4, SRC1, ACTR, PI 60, CLOCK; and DNA demethylases such as Ten-Eleven Translocation (TET) dioxygenase 1 (TETICD), TET1, DME, DML1, DML2, ROS1.

[0144] Non-limiting examples of the transcriptional effector that reduces expression or activity of the target gene can include, but are not limited to, transcriptional repressors such as the Kruppel associated box (KRAB or SKD); KOX1 repression domain; the Mad mSIN3 interaction domain (SID); the ERF repressor domain (ERD), the SRDX repression domain (e.g, for repression in plants), and the like; histone lysine methyltransferases such as Pr-SET7/8, SUV4-20H1, RIZ1, and the like; histone lysine demethylases such as JMJD2A/JHDM3A, JMJD2B, JMJD2C/GASC1, JMJD2D, JARJD 1 A/RBP2, JARIDIB/PLU-1, JARID 1C/SMCX, JARIDID/SMCY, and the like; histone lysine deacetylases such as HDAC1, HDAC2, HDAC3, HDAC8, HDAC4, HDAC5, HDAC7, HDAC9, SIRT1, SIRT2, HDAC11, and the like; DNA methylases such as Hhal DNA m5c-methyltransferase (M.Hhal), DNA methyltransferase 1 (DNMT1), DNA methyltransferase 3a (DNMT3a), DNA methyltransferase 3b (DNMT3b), METI, DRM3 (plants), ZMET2, CMT1, CMT2 (plants), and the like; and periphery recruitment elements such as Lamin A, Lamin B, and the like.

[0145] Various aspects of the present disclosure provide for a plurality of heterologous genetic circuits that are individually activatable to modulate expression and/or activity levels of a plurality of distinct target genes in a sequential manner. In some embodiments, a first heterologous genetic circuit is activated to convert a plurality of cells from a first cell type to a second cell type and, subsequently, a second heterologous genetic circuit is activated to convert the plurality of cells from the second cell type to a target cell type.

[0146] In some embodiments, the activation of the second genetic circuit can be performed immediately following the activation of the first heterologous genetic circuit. Alternatively, the activation of the second genetic circuit can be performed at least about 30 minutes, at least about 1 hour, at least about 2 hours, at least about 3 hours, at least about 4 hours, at least about 5 hours, at least about 6 hours, at least about 7 hours, at least about 8 hours, at least about 9 hours, at least about 10 hours, at least about 11 hours, at least about 12 hours, at least about 16 hours, at least about 20 hours, at least about 24 hours, at least about 2 days, at least about 3 days, at least about 4 days, at least about 5 days, at least about 6 days, at least about 7 days, at least about 2 weeks, at least about 3 weeks, at least about 4 weeks, at least about 2 months, at least about 3 months, at least about 4 months, at least about 5 months, at least about 6 months, at least about 1 year, or more subsequent to the activation of the first genetic circuit.

[0147] One or more target genes as disclosed herein can comprise one or more endogenous genes (e.g., genomic DNA, mRNA, mitochondrial DNA, etc.), exogenous genes, transgenes, or a combination thereof.

[0148] One or more target genes as disclosed herein can comprise a cell differentiation regulatory factor, a molecular function regulatory factor, a binding factor, a fusogenic factor, a protein folding chaperone, a protein tag, a RNA folding chaperone, a cell signaling factor, an immune response factor, a sensory receptor, a cell structural factor, a protein binding factor, a cargo receptor, a catalytic factor, or a small molecule sensor.

[0149] One or more target genes as disclosed herein can comprise a cell differentiation regulatory factor that comprises a growth factor, a transcription factor, a myogenic regulatory factor, an immune cell regulatory factor, a neuronal regulatory factor, a stem cell differentiation factor, a chondrogenic regulatory factor, an osteogenic regulatory factor, a senescence factor, a stemness factor (e.g., de-differentiation factor), etc.

[0150] In some cases, the one or more target genes (e.g., one or more chondrogenic regulatory factors) can comprise Sox2, Sox6, Sox9, Shox2, Gli3, Trps1, Oct4, NANOG, Chondrogenicx3.2, Brachyury, Mixl1, Tbx6, Msgn1, Parxis, Pax9, Runx2, Runx3, Smad1, Smad5, and Smad8.

[0151] In some cases, the one or more target genes can comprise a homeobox gene. Homeobox genes are genes that regulate, for example, large-scale anatomical features in the early stages of embryonic development. Types of homeobox genes include HOX genes, LIM genes, PAX genes, POU genes, CERS genes, HNF genes, SINE genes, CUT genes, ZF genes, paraHOX genes, DLX genes, TALE genes, PRD genes, and NKL genes. Non-limiting examples of homeobox genes can include HOXA1, HOXA2, HOXA3, HOXA4, HOXA5, HOXA6, HOXA7, HOXA9, HOXA10, HOXA11, HOXA13, HOXB1, HOXB2, HOXB3, HOXB4, HOXB5, HOXB6, HOXB7, HOXB8, HOXB9, HOXB13, HOXC4, HOXC5, HOXC6, HOXC8, HOXC9, HOXC10, HOXC11, HOXC12, HOXC13, HOXD1, HOXD3, HOXD4, HOXD8, HOXD9, HOXD10, HOXD11, HOXD12, HOXD13, CDX1, CDX2, CDX4, GSX1, GSX2, PDX1, EVX1, EVX2, GBX1, GBX2, MEOX1, MEOX2, MNX1, DLX1, DLX2, DLX3, DLX4, DLX5, DLX6, IRX1, IRX2, IRX3, IRX4, IRX5, IRX6, MEIS1, MEIS2, MEIS3, MKX, PBX1, PBX2, PBX3, PBX4, PKNOX1, PKNOX2, TGIF1, TGIF2, TGIF2LX, TGIF2LY, ISL1, ISL2, LHX1, LHX2, LHX3, LHX4, LHX5, LHX6, LHX8, LHX9, LMXIA, LMX1B, HDX, POUIF1, POU2F1, POU2F2, POU2F3, POU3F1, POU3F2, POU3F3, POU3F4, POU4F1, POU4F2, POU4F3, POU5F1, POU5F1P1, POU5F1P4, POU5F2, POU6F1, POU6F2, LASS2, LASS3, LASS4, LASS5, LASS6, HMBOX1, HNFIA, HNFIB, SIX1, SIX2, SIX3, SIX4, SIX5, SIX6, ONECUT1, ONECUT2, ONECUT3, CUX1, CUX2, SATB1, SATB2, ADNP, ADNP2, TSHZ1, TSHZ2, TSHZ3, ZEB1, ZEB2, ZFHX2, ZFHX3, ZFHX4, ZHX1, HOMEZ, ALX1 (CARTI), ALX3, ALX4, ARGFX, ARX, DMBX1, DPRX, DRGX, DUXA, DUXB, DUX (1, 2, 3, 4, 4c, 5), ESXI, GSC, GSC2, HESX1, HOPX, ISX, LEUTX, MIXL1, NOBOX, OTP, OTX1, OTX2, CRX, PAX2, PAX3, PAX4, PAX5, PAX6, PAX7, PAX8, PHOX2A, PHOX2B, PITX1, PITX2, PITX3, PROPI, PRRX1, PRRX2, RAX, RAX2, RHOXF1, RHOXF2/2B, SEBOX, SHOX, SHOX2, TPRX1, UNCX, VSX1, VSX2, BARHL1, BARHL2, BARX1, BARX2, BSX, DBX1, DBX2, EMX1, EMX2, EN1, EN2, HHEX, HLX1, LBX1, LBX2, MSX1, MSX2, NANOG, NOTO, TLX1, TLX2, TLX3, TSHZ1, TSHZ2, TSHZ3, VAX1, VAX2, VENTX, NKX2-1, NKX2-4, NKX2-2, NKX2-8, NKX3-1, NKX3-2, NKX2-3, NKX2-5, NKX2-6, HMX1, HMX2, HMX3, NKX6-1, NKX6-2, and NKX6-3.

[0152] In some cases, the target gene can comprise MIXL1. MIXL1 is a transcription factor that preferentially binds to the DNA sequence TAAT on the MIX gene and plays a role in mesoderm patterning and tissue specification at gastrulation.

[0153] In some cases, the target gene can comprise UNCX. UNCX is a transcription factor that is involved in somitogenesis and neurogenesis. UNCX is also required for the maintenance and differentiation of specific elements of the axial skeleton.

[0154] In some cases, the target gene can comprise PAX9. PAX9 is a transcription factor that is required for development of the thymus, parthyroid glands, ultimobranchial bodies, teeth, skeleton, and limbs.

[0155] In some cases, the one or more target genes can comprise T-box transcription factors (TBX genes). TBX transcription factors are involved in development. T-box proteins have relatively large DNA-binding domains. Non-limiting examples of TBX transcription factors can include TBX1, TBX2, TBX3, TBX4, TBX5, TBX6, TBX10, TBX15, TBX18, TBX19, TBX20, TBX21, TBX22, and TBXT (Brachyury protein).

[0156] In some cases, the target gene can comprise TBXT. TBXT, also known as T-box transcription factor T or brachyury protein, functions as a transcription factor in the T-box family of genes. TBXT has a role in defining the midline of a bilateral organism, helping to establish the anterior-posterior axis. It can also assist in defining the mesoderm during gastrulation.

[0157] In some cases, the target gene can comprise TBX6. TBX6, also known as T-box transcription factor 6, is involved in the segmentation of the paraxial mesoderm into somites.

[0158] In some cases, the one or more target genes can comprise a basic helix-loop-helix transcription factor (bHLH gene). bHLH transcription factors are involved in the regulation of the cell cycle and many other developmental processes. bHLH proteins have a basic helix-loop-helix protein structure. Non-limiting examples of bHLH transcription factors can include AHR, AHRR, ARNT, ARNT2, ARNTL, ARNTL2, ASCL1, ASCL2, ASCL3, ASCL4, ATOHI, ATOH7, ATOH8, BHLHB2, BHLHB3, BHLHB4, BHLHB5, BHLHB8, CLOCK, EPASI, FERD3L, FIGLA, HAND1, HAND2, HES1, HES2, HES3, HES4, HES5, HES6, HES7, HEY1, HEY2, HIFIA, ID1, ID2, ID3, ID4, KIAA2018, LYLI, MASHI, MATH2, MAX, MESP1, MESP2, MIST1, MITF, MLX, MLXIP, MLXIPL, MNT, MSC, MSGN1, MXDI, MXD3, MXD4, MXI1, MYC, MYCL1, MYCL2, MYCN, MYF5, MYF6, MYOD1, MYOG, NCOAI, NCOA3, NEUROD1, NEUROD2, NEUROD4, NEUROD6, NEUROG1, NEUROG2, NEUROG3, NHLH1, NHLH2, NPAS1, NPAS2, NPAS3, NPAS4, OAF1, OLIG1, OLIG2, OLIG3, PTFIA, SCL, SCXB, SIM1, SIM2, SOHLH1, SOHLH2, SREBF1, SREBF2, TAL1, TAL2, TCF12, TCF15, TCF21, TCF3, TCF4, TCFL5, TFAP4, TFE3, TFEB, TFEC, TWIST1, TWIST2, USF1, and USF2.

[0159] In some cases, the target gene can comprise MSGN1. MSGN1, also known as mesogenin 1, is a Wnt-activated bHLH transcription factor which is involved in mesoderm formation and regulation of transcription by RNA polymerase II. MSGN1 can also be involved with somitogenesis.

[0160] In some cases, the target gene can comprise TCF15. TCF15 is an early transcription factor that plays a role in somitogenesis, paraxial mesoderm development, and regulation of stem cell pluripotency.

[0161] In some cases, the one or more target genes can comprise a SRY-related box transcription factor (SOX gene). SOX transcription factors are involved in developmental regulation. Non-limiting examples of SOX transcription factors can include SOX1, SOX2, SOX3, SOX4, SOX5, SOX6, SOX7, SOX8, SOX9, SOX10, SOX11, SOX12, SOX13, SOX14, SOX15, SOX17, SOX18, SOX21, SOX30, and SRY.

[0162] In some cases, the one or more target genes can comprise SOX group A, comprising SRY. In some cases, the one or more target genes can comprise SOX group B1, comprising SOX1, SOX2 and/or SOX3. In some cases, the one or more target genes can comprise SOX group B2, comprising SOX14 and/or SOX21. In some cases, the one or more target genes can comprise SOX group C, comprising SOX4, SOX11 and/or SOX12. In some cases, the one or more target genes can comprise SOX group D, comprising SOX5, SOX6, and/or SOX13. In some cases, the one or more target genes can comprise SOX group E, comprising SOX8, SOX9, and/or SOX10. In some cases, the one or more target genes can comprise SOX group F, comprising SOX7, SOX 17, and/or SOX18. In some cases, the one or more target genes can comprise SOX group G, comprising SOX15. In some cases, the one or more target genes can comprise SOX group H, comprising SOX30.

[0163] In some cases, the target gene can comprise SOX6. SOX6 is a transcription factor which is required for development of the central nervous system, chondrogenesis, and maintenance of cardiac and skeletal muscle cells.

[0164] In some cases, the target gene can comprise SOX9. SOX9 is a transcription factor which acts during chondrocyte differentiation and regulates transcription of the anti-Muellerian hormone (AMH) gene.

[0165] In some cases, the one or more target genes can comprise a collagen. Collagens are fibrous proteins and are the major elements of skin, bone, tendon, cartilage, blood vessels, and teeth. Collagens form insoluble fibers of high tensile strength. Non-limiting examples of collagen genes can include COL1A1, COL1A2, COL2A1, COL3A1, COL4A1, COL4A2, COL4A3, COL4A4, COL4A5, COL4A6, COL5A1, COL5A2, COL5A3, COL6A1, COL6A2, COL6A3, COL6A4P1, COL6A4P2, COL6A5, COL6A6, COL7A1, COL8A1, COL8A2, COL9A1, COL9A2, COL9A3, COL10A1, COL11A1, COL11A2, COL12A1, COL13A1, COL14A1, COL15A1, COL16A1, COL17A1, COL18A1, COL19A1, COL20A1, COL21A1, COL22A1, COL23A1, COL24A1, COL25A1, COL26A1, COL27A1, and COL28A1.

[0166] In some cases, the target gene can comprise COL2A1. COL2A1 is a component of the pro-alpha1 chain of type II collagen. Type II collagen adds structure and strength to connective tissues that support the body's muscles, joints, organs, and skin. Type II collagen is found primarily in cartilage.

[0167] In some cases, use of the heterologous genetic circuit as disclosed herein can be used to differentiate mesodermal stem cells (MSCs) into chondroprogenitor cells whereby at least about 5%, at least about 6%, at least about 7%, at least about 8%, at least about 9%, at least about 10%, at least about 20%, at least about 30%, at least about 40%, at least about 50%, at least about 60%, at least about 70%, at least about 80%, at least about 90%, or at least about 100% of the resulting cells generated by using the heterologous genetic circuit as disclosed herein are the target cell type.

[0168] In some cases, use of the heterologous genetic circuit as disclosed herein can be used to differentiate mesodermal stem cells (MSCs) into chondroprogenitor cells, e.g., in absence of one, two, or all of feeder cells, serum, and exogenous growth factors. Using the heterologous genetic circuit as disclosed herein can generate at least about 1×10⁴, at least about 2×10⁴, at least about 5×10⁴, at least about 1×10⁵, at least about 2×10⁵, at least about 5×10⁵, at least about 1×10⁶, at least about 2×10⁶, at least about 5×10⁶, at least about 1×10⁷, at least about 2×10⁷, at least about 5×10⁷, at least about 1×10⁸, at least about 2×10⁸, at least about 5×10⁸, at least about 1×10⁹, at least about 2×10⁹, at least about 5×10⁹, at least about 1×10¹⁰, at least about 2×10¹⁰, at least about 5×10¹⁰, at least about 1×10¹⁵, at least about 2×10¹⁵, at least about 5×10¹⁵, or more chondrogenic cells from at most about 1×10⁶, at most about 9×10⁵, at most about 8×10⁵, at most about 7×10⁵, at most about 6×10⁵, at most about 5×10⁵, at most about 4×10⁵, at most about 3×10⁵, at most about 2×10⁵, at most about 1×10⁵, at most about 5×10⁴, at most about 2×10⁴, at most about 1×10⁴, or more chondroprogenitor cells.

[0169] In some cases, use of the heterologous genetic circuit as disclosed herein can be used to differentiate pluripotent stem cells (PSCs, such as induced PSCs or iPSCs) into chondrogenic cells, e.g., in absence of one, two, or all of feeder cells, serum, and exogenous growth factors. Using the heterologous genetic circuit as disclosed herein can generate at least about 1×10⁴, at least about 2×10⁴, at least about 5×10⁴, at least about 1×10⁵, at least about 2×10⁵, at least about 5×10⁵, at least about 1×10⁶, at least about 2×10⁶, at least about 5×10⁶, at least about 1×10⁷, at least about 2×10⁷, at least about 5×10⁷, at least about 1×10⁸, at least about 2×10⁸, at least about 5×10⁸, at least about 1×10⁹, at least about 2×10⁹, at least about 5×10⁹, at least about 1×10¹⁰, at least about 2×10¹⁰, at least about 5×10¹⁰, at least about 1×10¹⁵, at least about 2×10¹⁵, at least about 5×10¹⁵, or more chondrogenic cells from at most about 1×10⁶, at most about 9×10⁵, at most about 8×10⁵, at most about 7×10⁵, at most about 6×10⁵, at most about 5×10⁵, at most about 4×10⁵, at most about 3×10⁵, at most about 2×10⁵, at most about 1×10⁵, at most about 5×10⁴, at most about 2×10⁴, at most about 1×10⁴, or more chondroprogenitor cells.

[0170] Such generation of chondrogenic cells by using the heterologous genetic circuit as disclosed herein can be achieved within the span of at most about 60 days, at most about 55 days, at most about 50 days, at most about 45 days, at most about 40 days, at most about 35 days, at most about 30 days, at most about 25 days, at most about 20 days, at most about 15 days, at most about 10 days, at most about 7 days, at most about 6 days, at most about 5 days, at most about 4 days, at most about 3 days, at most about 2 days, at most about 1 day, or less.

[0171] In some cases, the chondrogenic cells generated through this method produce more cartilage as compared to chondrogenic cells obtained via directed differentiation. The chondrogenic cells generated using the provided methods can produce at least about 5%, at least about 10%, at least about 15%, at least about 20%, at least about 25%, at least about 30%, at least about 35%, at least about 40%, at least about 45%, at least about 50%, at least about 55%, at least about 60%, at least about 65%, at least about 70%, at least about 75%, at least about 80%, at least about 85%, at least about 90%, at least about 95%, at least about 100%, at least about 120%, at least about 150%, or at least about 200% more cartilage than chondrogenic cells obtained via directed differentiation. Alternatively, or in addition to, the chondrogenic cells generated through this method may have an equivalent amount of cartilage produced as compared to chondrogenic cells obtained via directed differentiation.

[0172] In some cases, the chondrogenic cells or chondroprogenitor cells generated through this method exhibit higher expression levels of two or more positive chondroprogenitor cell markers as compared to control chondroprogenitor cells. Non-limiting examples of positive chondroprogenitor cell markers can include CD146, CD73, CD112, and BMPR1.

[0173] In some cases, the chondrogenic cells or chondroprogenitor cells generated through this method exhibit at least about 0.1%, at least about 0.2%, at least about 0.3%, at least about 0.4%, at least about 0.5%, at least about 0.6%, at least about 0.7%, at least about 0.8%, at least about 0.9%, at least about 1%, at least about 2%, at least about 3%, at least about 4%, at least about 5%, at least about 6%, at least about 7%, at least about 8%, at least about 9%, at least about 10%, at least about 20%, at least about 30%, at least about 40%, at least about 50%, at least about 60%, at least about 70%, at least about 80%, at least about 90%, at least about 100%, at least about 200%, at least about 300%, at least about 400%, at least about 500%, at least about 600%, at least about 700%, at least about 800%, at least about 900%, at least about 1,000%, at least about 2,000%, at least about 3,000%, at least about 4,000%, at least about 5,000%, at least about 6,000%, at least about 7,000%, at least about 8,000%, at least about 9,000%, at least about 10,000%, at least about 100,000%, or at least about 1,000,000% higher expression levels of positive chondroprogenitor cell markers as compared to control chondroprogenitor cells.

[0174] In some cases, the chondrogenic cells or chondroprogenitor cells generated through this method exhibit at least or up to about 0.1-fold, at least or up to about 0.2-fold, at least or up to about 0.3-fold, at least or up to about 0.4-fold, at least or up to about 0.5-fold, at least or up to about 0.6-fold, at least or up to about 0.7-fold, at least or up to about 0.8-fold, at least or up to about 0.9-fold, at least or up to about 1-fold, at least or up to about 2-fold, at least or up to about 3-fold, at least or up to about 4-fold, at least or up to about 5-fold, at least or up to about 6-fold, at least or up to about 7-fold, at least or up to about 8-fold, at least or up to about 9-fold, at least or up to about 10-fold, at least or up to about 20-fold, at least or up to about 30-fold, at least or up to about 40-fold, at least or up to about 50-fold, at least or up to about 60-fold, at least or up to about 70-fold, at least or up to about 80-fold, at least or up to about 90-fold, at least or up to about 100-fold, at least or up to about 500-fold, at least or up to about 1,000-fold, at least or up to about 5,000-fold, or at least or up to about 10,000-fold higher expression levels of positive chondroprogenitor cell markers as compared to control chondroprogenitor cells.

[0175] In some cases, the chondrogenic cells or chondroprogenitor cells generated through this method exhibit higher expression levels of two or more negative chondroprogenitor cell markers as compared to control chondroprogenitor cells. Non-limiting examples of negative chondroprogenitor cell markers can include CD326 and CD309.

[0176] In some cases, the chondrogenic cells or chondroprogenitor cells generated through this method exhibit at least about 0.1%, at least about 0.2%, at least about 0.3%, at least about 0.4%, at least about 0.5%, at least about 0.6%, at least about 0.7%, at least about 0.8%, at least about 0.9%, at least about 1%, at least about 2%, at least about 3%, at least about 4%, at least about 5%, at least about 6%, at least about 7%, at least about 8%, at least about 9%, at least about 10%, at least about 20%, at least about 30%, at least about 40%, at least about 50%, at least about 60%, at least about 70%, at least about 80%, at least about 90%, at least about 100%, at least about 200%, at least about 300%, at least about 400%, at least about 500%, at least about 600%, at least about 700%, at least about 800%, at least about 900%, at least about 1,000%, at least about 2,000%, at least about 3,000%, at least about 4,000%, at least about 5,000%, at least about 6,000%, at least about 7,000%, at least about 8,000%, at least about 9,000%, at least about 10,000%, at least about 100,000%, or at least about 1,000,000% lower expression levels of negative chondroprogenitor cell markers as compared to control chondroprogenitor cells.

[0177] In some cases, the chondrogenic cells or chondroprogenitor cells generated through this method exhibit at least or up to about 0.1-fold, at least or up to about 0.2-fold, at least or up to about 0.3-fold, at least or up to about 0.4-fold, at least or up to about 0.5-fold, at least or up to about 0.6-fold, at least or up to about 0.7-fold, at least or up to about 0.8-fold, at least or up to about 0.9-fold, at least or up to about 1-fold, at least or up to about 2-fold, at least or up to about 3-fold, at least or up to about 4-fold, at least or up to about 5-fold, at least or up to about 6-fold, at least or up to about 7-fold, at least or up to about 8-fold, at least or up to about 9-fold, at least or up to about 10-fold, at least or up to about 20-fold, at least or up to about 30-fold, at least or up to about 40-fold, at least or up to about 50-fold, at least or up to about 60-fold, at least or up to about 70-fold, at least or up to about 80-fold, at least or up to about 90-fold, at least or up to about 100-fold, at least or up to about 500-fold, at least or up to about 1,000-fold, at least or up to about 5,000-fold, or at least or up to about 10,000-fold lower expression levels of negative chondroprogenitor cell markers as compared to control chondroprogenitor cells.

[0178] In some cases, expression levels of chondroprogenitor cell markers can be measured using methods such as, but not limited to, RT-PCR, Western blotting, Northern blotting, protein staining, mRNA staining, and RNA-sequencing.

[0179] In some cases, expression levels can be measured at least about 12 hours, at least about 13 hours, at least about 14 hours, at least about 15 hours, at least about 16 hours, at least about 17 hours, at least about 18 hours, at least about 19 hours, at least about 20 hours, at least about 21 hours, at least about 22 hours, at least about 23 hours, at least about 24 hours, at least about 28 hours, at least about 32 hours, at least about 36 hours, at least about 40 hours, at least about 44 hours, at least about 48 hours, at least about 3 days, at least about 4 days, at least about 5 days, at least about 6 days, at least about 7 days, at least about 8 days, at least about 9 days, at least about 10 days, at least about 11 days, at least about 12 days, at least about 13 days, at least about 14 days or more days after the introduction of a genetic circuit.

[0180] In some cases, the chondrogenic cells or chondroprogenitor cells generated through this method can be chondrocytes. Alternatively, chondrogenic cells or chondroprogenitor cells generated through this method can be cells other than chondrocytes (e.g., chondroblasts). In some cases, the progenitor cells generated can be substantially mitotically dormant. Alternatively, the progenitor cells generated can be substantially mitotically active.

[0181] In some cases, a first gate unit can be configured to reduce expression and/or activity levels of one or more target genes. In some cases, a first gate unit can be configured to enhance expression and/or activity levels of one or more target genes. In some cases, a first gate unit can be configured to maintain expression and/or activity levels of one or more target genes.

[0182] In some cases, modulation of a first target gene can occur prior to modulation of a second target gene. In some cases, modulation of a first target gene can occur subsequent to modulation of a second target gene. In some cases, modulation of a first target gene can occur at about the same time as modulation of a second target gene.

[0183] In some cases, use of the heterologous genetic circuit can induce cells to differentiate into the cell type of interest in absence of growth factors, serum (fetal bovine serum, human serum AB, etc.), or other exogenous cell differentiation regulatory factors or mediums. Serum can comprise liquid fractions of clotted blood, including nutritional and macromolecular factors essential for cell growth.

[0184] Alternatively, use of the heterologous genetic circuit can induce cells to differentiate into the cell type of interest using a reduced amount of serum and/or growth factors (e.g., reduced by at least about 1%, at least about 2%, at least about 3%, at least about 4%, at least about 5%, at least about 6%, at least about 7%, at least about 8%, at least about 9%, at least about 10%, at least about 15%, at least about 20%, at least about 30%, at least about 40%, at least about 50%, at least about 60%, at least about 70%, at least about 80%, at least about 90%, at least about 91%, at least about 92%, at least about 93%, at least about 94%, at least about 95%, at least about 96%, at least about 97%, at least about 98%, at least about 99%, or substantially free of serum). Reduced amounts of serum can allow for more consistency across experiments or batches of cells, increased growth and/or productivity of differentiated cells, better control over physiological responsiveness, and reduced risk around contamination by serum-born agents in cell culture.

[0185] In some cases, use of the heterologous genetic circuit in the stem cells (e.g., iSPCs, MSCs) can induce the MSCs to differentiate into chondrogenic cells in absence of growth factors, serum (fetal bovine serum, human serum AB, etc.), or other exogenous cell differentiation regulatory factors or mediums. In some cases, use of the heterologous genetic circuit as disclosed herein can be used to differentiate the stem cells into chondrogenic cells in the absence of one or both growth factors and serum. The resulting chondrogenic cells generated by using the heterologous genetic circuit as disclosed herein are at least about 5%, at least about 6%, at least about 7%, at least about 8%, at least about 9%, at least about 10%, at least about 15%, at least about 20%, at least about 30%, at least about 40%, at least about 50%, at least about 60%, at least about 70%, at least about 80%, at least about 90% or at least about 100% of the total resultant cell population.

[0186] In some cases, conversion from one cell type (e.g., PSCs, MSCs or chondroprogenitor cells) to another cell type (e.g., chondrogenic cells) using a heterologous genetic circuit can result in the target cell type. Alternatively, conversion from one cell type (e.g., PSCs, MSCs or chondroprogenitor cells) to another cell type (e.g., chondrogenic cells) using a heterologous genetic circuit can result in an intermediate cell type. An intermediate cell type can undergo a second conversion using a second genetic circuit to result in the target cell type.

[0187] The conversion of a cell from one cell type to another can comprise the regulation of a plurality of target genes. For example, the conversion can comprise the regulation of at least about 1, at least about 2, at least about 3, at least about 4, at least about 5, at least about 6, at least about 7, at least about 8, at least about 9, at least about 10, at least about 15, at least about 20, at least about 30, at least about 40, at least about 50, or more target genes. The conversion can comprise the regulation of at most about 50, at most about 40, at most about 30, at most about 20, at most about 15, at most about 10, at most about 9, at most about 8, at most about 7, at most about 6, at most about 5, at most about 4, at most about 3, at most about 2, or at most about 1 target gene(s). Each gene that is disclosed herein can be subjected to at least about 1, at least about 2, at least about 3, at least about 4, at least about 5, at least about 6, at least about 7, at least about 8, at least about 9, at least about 10, at least about 15, at least about 20, at least about 30, at least about 40, at least about 50, or more modulations. Each gene that is disclosed herein can be subjected to at most about 50, at most about 40, at most about 30, at most about 20, at most about 15, at most about 10, at most about 9, at most about 8, at most about 7, at most about 6, at most about 5, at most about 4, at most about 3, at most about 2, or at most about 1 modulation(s). One or more modulations of a target gene (e.g., an endogenous gene), as induced by the heterologous genetic circuit of the present disclosure, may be an artificial modulation (or a heterologous modulation) that may otherwise not occur in the cell in absence of (i) the heterologous genetic circuit and/or (ii) the activating moiety of the heterologous genetic circuit.

[0188] As demonstrated in FIG. 3, various heterologous genetic circuits can be designed to modulate expression or activity levels of a plurality of genes (e.g., a plurality of endogenous genes) in a cell over a plurality of different time points.

[0189] For example, a heterologous genetic circuit can be designed to (i) modulate expression levels of a first gene and (ii) subsequently modulate expression levels of a second gene. For example, a heterologous genetic circuit can be designed to (i) activate expression levels of a first gene and (ii) subsequently activate expression levels of a second gene. Alternatively, a heterologous genetic circuit can be designed to (i) activate expression levels of a first gene and (ii) subsequently reduce expression levels of a second gene. Alternatively, a heterologous genetic circuit can be designed to (i) reduce expression levels of a first gene and (ii) subsequently activate expression levels of a second gene. Alternatively, a heterologous genetic circuit can be designed to (i) reduce expression levels of a first gene and (ii) subsequently reduce expression levels of a second gene. The first gene and the second gene can be the same gene. Alternatively, the first gene and the second gene can be different genes. A heterologous genetic circuit can be designed to modulate the expression levels of an additional gene. A heterologous genetic circuit can be designed to include at least 1, at least 2, at least 3, at least 4, at least 5, at least 6, at least 7, at least 8, at least 9 at least 10, or more additional genes. An additional gene can be activated. Alternatively, an additional gene can be reduced. A heterologous genetic circuit can be designed to modulate expression of the additional gene prior to modulation of expression levels of both the first gene and the second gene. Alternatively or in addition to, a heterologous genetic circuit can be designed to modulate expression of the additional gene subsequent to modulation of expression levels of the first gene and prior to modulation of expression levels of the second gene. Alternatively or in addition to, a heterologous genetic circuit can be designed to modulate expression of the additional gene subsequent to modulation of expression levels of both the first gene and the second gene.

[0190] For example, a heterologous genetic circuit can be designed to (i) modulate expression levels of a first homeobox gene and (ii) subsequently modulate expression levels of a second homeobox gene. For example, a heterologous genetic circuit can be designed to (i) activate expression levels of a first homeobox gene and (ii) subsequently activate expression levels of a second homeobox gene. Alternatively, a heterologous genetic circuit can be designed to (i) activate expression levels of a first homeobox gene and (ii) subsequently reduce expression levels of a second homeobox gene. Alternatively, a heterologous genetic circuit can be designed to (i) reduce expression levels of a first homeobox gene and (ii) subsequently activate expression levels of a second homeobox gene. Alternatively, a heterologous genetic circuit can be designed to (i) reduce expression levels of a first homeobox gene and (ii) subsequently reduce expression levels of a second homeobox gene. The first homeobox gene and the second homeobox gene can be the same gene. Alternatively, the first homeobox gene and the second homeobox gene can be different genes.

[0191] A heterologous genetic circuit can be designed to include another gene in addition to the first and second homeobox genes. An additional gene can be modulated before, simultaneously with, or after the first homeobox protein. Alternatively or in addition to, an additional gene can be modulated before, simultaneously with, or after the second homeobox protein. The heterologous genetic circuit can be designed to activate the additional gene. Alternatively, the heterologous genetic circuit can be designed to reduce the additional gene. The additional gene can be, but is not limited to, a T-box transcription factor (TBX), a basic helix-loop-helix transcription factor (bHLH), a SOX, and a collagen.

[0192] A heterologous genetic circuit can be designed to include two members selected from the group consisting of a homeobox protein, a T-box transcription factor (TBX), and a basic helix-loop-helix transcription factor (bHLH). A heterologous genetic circuit can be designed to include a homeobox protein and a TBX. A heterologous genetic circuit can be designed to include a homeobox protein and a bHLH. A heterologous genetic circuit can be designed to include a TBX and a bHLH.

[0193] A heterologous genetic circuit can be designed to include a first member that is a homeobox protein, a TBX, or a bHLH and a second member that is a SOX or collagen. A heterologous genetic circuit can be designed to include a homeobox protein and a SOX. A heterologous genetic circuit can be designed to include homeobox protein and a collagen. A heterologous genetic circuit can be designed to include a TBX and a SOX. A heterologous genetic circuit can be designed to include a TBX and a collagen. A heterologous genetic circuit can be designed to include a bHLH and a SOX. A heterologous genetic circuit can be designed to include a bHLH and a collagen.

[0194] For example, heterologous genetic circuit #10 can be designed to (i) activate expression level of TBXT and MIXL1 at time point 1 (denoted as step 1), (ii) subsequently activate expression levels of MSGN1 and TBX6 at a time point after step 1 (denoted as step 2), (iii) subsequently activate expression levels of UNCX, TCF15, and PAX9 at a time point after step 2 (denoted as step 3), and (iv) subsequently activate expression levels of SOX6 at a time point after step 3 (denoted as step 4). For comparison, a control heterologous genetic circuit (denoted as All-at-once 1) can be designed to simultaneously activate the same target endogenous genes from the heterologous genetic circuit #10.

[0195] Activating a heterologous genetic circuit in a cell as disclosed herein can modulate expression or activity levels of a plurality of genes over a plurality of different time points, to effect conversion of the cell into a different cell type (e.g., stem cells into tissue-specific progenitor cells, etc.). A rate of such cell type conversion by use of the heterologous genetic circuit can be greater than a rate of the cell type conversion by use of the control heterologous genetic circuit (e.g., for simultaneous activation of multiple target genes) by at least or up to about 1 percent (%), at least or up to about 2%, at least or up to about 5%, at least or up to about 10%, at least or up to about 15%, at least or up to about 20%, at least or up to about 25%, at least or up to about 30%, at least or up to about 35%, at least or up to about 40%, at least or up to about 45%, at least or up to about 50%, at least or up to about 60%, at least or up to about 70%, at least or up to about 80%, at least or up to about 90%, or at least or up to about 95%.

[0196] Activating a heterologous genetic circuit in a cell as disclosed herein can modulate expression or activity levels of a plurality of genes over a plurality of different time points, to effect conversion of the cell into a different cell type (e.g., stem cells into tissue-specific progenitor cells, etc.). The conversion of the cell into a different cell type can occur in less than about 20 days, less than about 19 days, less than about 18 days, less than about 17 days, less than about 16 days, less than about 15 days, less than about 14 days, less than about 13 days, less than about 12 days, less than about 11 days, less than about 10 days, less than about 9 days, less than about 8 days, less than about 7 days, less than about 6 days, less than about 5 days, less than about 4 days, less than about 3 days, less than about 2 days, or less than about 1 day.

[0197] A cell (e.g., an initial cell to be modified into the engineered cell as disclosed herein, a final cell product generated from the engineered cell as disclosed herein, etc.) can comprise a muscle cell, an immune cell, a neuron, an osteoblast, an endothelial cell, an mesenchymal cell, an epithelial cell, a stem cell, an secretory cell, a blood cell, a germ cell, a nurse cell, a storage cell, an enteroendocrine cell, a pituitary cell, a mesoderm cell, a chondroprogenitor cell, a neurosecretory cell, a duct cell, an odontoblast, a cementoblast, a glial cell, or an interstitial cell.

[0198] Non-limiting examples of such cell can include lymphoid cells, such as B cell, T cell (Cytotoxic T cell, Natural Killer T cell, Regulatory T cell, T helper cell), Natural killer cell, cytokine induced killer (CIK) cells (see e.g. US20080241194); myeloid cells, such as granulocytes (Basophil granulocyte, Eosinophil granulocyte, Neutrophil granulocyte/Hypersegmented neutrophil), Monocyte/Macrophage, Red blood cell (Reticulocyte), Mast cell, Thrombocyte/Megakaryocyte, Dendritic cell; cells from the endocrine system, including thyroid (Thyroid epithelial cell, Parafollicular cell), parathyroid (Parathyroid chief cell, Oxyphil cell), adrenal (Chromaffin cell), pineal (Pinealocyte) cells; cells of the nervous system, including glial cells (Astrocyte, Microglia), Magnocellular neurosecretory cell, Stellate cell, Boettcher cell, and pituitary (Gonadotrope, Corticotrope, Thyrotrope, Somatotrope, Lactotroph); cells of the Respiratory system, including Pneumocyte (Type I pneumocyte, Type II pneumocyte), Clara cell, Goblet cell, Dust cell; cells of the circulatory system, including Myocardiocyte, Pericyte; cells of the digestive system, including stomach (Gastric chief cell, Parietal cell), Goblet cell, Paneth cell, G cells, D cells, ECL cells, I cells, K cells, S cells; enteroendocrine cells, including enterochromaffm cell, APUD cell, liver (Hepatocyte, Kupffer cell), Cartilage/bone/muscle; bone cells, including Osteoblast, Osteocyte, Osteoclast, teeth (Cementoblast, Ameloblast); paraxial mesoderm cells cartilage cells, including sclerotome cells, Chondroblasts, or Chondrocytes, skin cells, including Trichocyte, Keratinocyte, Melanocyte (Nevus cell); muscle cells, including Myocyte; urinary system cells, including Podocyte, Juxtaglomerular cell, Intraglomerular mesangial cell/Extraglomerular mesangial cell, Kidney proximal tubule brush border cell, Macula densa cell; reproductive system cells, including Spermatozoon, Sertoli cell, Leydig cell, Ovum; and other cells, including Adipocyte, Fibroblast, Tendon cell, Epidermal keratinocyte (differentiating epidermal cell), Epidermal basal cell (stem cell), Keratinocyte of fingernails and toenails, Nail bed basal cell (stem cell), Medullary hair shaft cell, Cortical hair shaft cell, Cuticular hair shaft cell, Cuticular hair root sheath cell, Hair root sheath cell of Huxley's layer, Hair root sheath cell of Henle's layer, External hair root sheath cell, Hair matrix cell (stem cell), Wet stratified barrier epithelial cells, Surface epithelial cell of stratified squamous epithelium of cornea, tongue, oral cavity, esophagus, anal canal, distal urethra and vagina, basal cell (stem cell) of epithelia of cornea, tongue, oral cavity, esophagus, anal canal, distal urethra and vagina, Urinary epithelium cell (lining urinary bladder and urinary ducts), Exocrine secretory epithelial cells, Salivary gland mucous cell (polysaccharide-rich secretion), Salivary gland serous cell (glycoprotein enzyme-rich secretion), Von Ebner's gland cell in tongue (washes taste buds), Mammary gland cell (milk secretion), Lacrimal gland cell (tear secretion), Ceruminous gland cell in ear (wax secretion), Eccrine sweat gland dark cell (glycoprotein secretion), Eccrine sweat gland clear cell (small molecule secretion). Apocrine sweat gland cell (odoriferous secretion, sex-hormone sensitive), Gland of Moll cell in eyelid (specialized sweat gland), Sebaceous gland cell (lipid-rich sebum secretion), Bowman's gland cell in nose (washes olfactory epithelium), Brunner's gland cell in duodenum (enzymes and alkaline mucus), Seminal vesicle cell (secretes seminal fluid components, including fructose for swimming sperm), Prostate gland cell (secretes seminal fluid components), Bulbourethral gland cell (mucus secretion), Bartholin's gland cell (vaginal lubricant secretion), Gland of Littre cell (mucus secretion), Uterus endometrium cell (carbohydrate secretion), Isolated goblet cell of respiratory and digestive tracts (mucus secretion), Stomach lining mucous cell (mucus secretion), Gastric gland zymogenic cell (pepsinogen secretion), Gastric gland oxyntic cell (hydrochloric acid secretion), Pancreatic acinar cell (bicarbonate and digestive enzyme secretion), Paneth cell of small intestine (lysozyme secretion), Type II pneumocyte of lung (surfactant secretion), Clara cell of lung, Hormone secreting cells, Anterior pituitary cells, Somatotropes, Lactotropes, Thyrotropes, Gonadotropes, Corticotropes, Intermediate pituitary cell, Magnocellular neurosecretory cells, Gut and respiratory tract cells, Thyroid gland cells, thyroid epithelial cell, parafollicular cell, Parathyroid gland cells, Parathyroid chief cell, Oxyphil cell, Adrenal gland cells, chromaffin cells, Ley dig cell of testes, Theca interna cell of ovarian follicle, Corpus luteum cell of ruptured ovarian follicle, Granulosa lutein cells, Theca lutein cells, Juxtaglomerular cell (renin secretion), Macula densa cell of kidney, Metabolism and storage cells, Barrier function cells (Lung, Gut, Exocrine Glands and Urogenital Tract), Kidney, Type I pneumocyte (lining air space of lung), Pancreatic duct cell (centroacinar cell), Nonstriated duct cell (of sweat gland, salivary gland, mammary gland, etc.), Duct cell (of seminal vesicle, prostate gland, etc.), Epithelial cells lining closed internal body cavities, Ciliated cells with propulsive function, Extracellular matrix secretion cells, Contractile cells; Skeletal muscle cells, stem cell, Heart muscle cells, Blood and immune system cells, Erythrocyte (red blood cell), Megakaryocyte (platelet precursor), Monocyte, Connective tissue macrophage (various types), Epidermal Langerhans cell, Osteoclast (in bone), Dendritic cell (in lymphoid tissues), Microglial cell (in central nervous system), Neutrophil granulocyte, Eosinophil granulocyte, Basophil granulocyte, Mast cell, Helper T cell, Suppressor T cell, Cytotoxic T cell, Natural Killer T cell, B cell, Natural killer cell, Reticulocyte, Stem cells and committed progenitors for the blood and immune system (various types), Pluripotent stem cells, Totipotent stem cells, Induced pluripotent stem cells, adult stem cells, Sensory transducer cells, Autonomic neuron cells, Sense organ and peripheral neuron supporting cells, Central nervous system neurons and glial cells, Lens cells, Pigment cells, Melanocyte, Retinal pigmented epithelial cell, Germ cells, Oogonium/Oocyte, Spermatid, Spermatocyte, Spermatogonium cell (stem cell for spermatocyte), Spermatozoon, Nurse cells, Ovarian follicle cell, Sertoli cell (in testis), Thymus epithelial cell, Interstitial cells, and Interstitial kidney cells.

[0199] In an aspect, the present disclosure provides for systems and methods that can convert a plurality of pluripotent stem cells (PSCs) into a plurality of tissue-specific progenitor cells.

[0200] A pluripotent stem cell can comprise an induced pluripotent stem cell (iPSC), or an embryonic stem cell (ESC). A tissue-specific progenitor cells can comprise a mesenchymal stem cell (MSC), a hematopoietic stem cell (HSC), a myeloid progenitor cell, a muscle stem cell, a chondroprogenitor cell, a neural stem cell, an epithelial stem cell, an epidermal stem cell, a mammary stem cell, an intestinal stem cell, a neural crest stem cell, or a testicular stem cell.

[0201] Various aspects of the present disclosure provide engineered cells that are programmed to induce a desired expression and/or activity level (or profile thereof) of one or more target genes in a cell.

[0202] In some embodiments, the engineered cell (e.g., the engineered chondrogenic cell) of the present disclosure can be generated from an isolated stem cell (e.g., isolated MSCs or iPSCs). The heterologous genetic circuit and/or its components (e.g. gate units, gate moieties, activating moieties, etc.), as disclosed herein, can be introduced during any stage (or cellular state) between and including (a) the isolated stem cell and (b) the differentiated chondrogenic cell state thereof (e.g. a terminally differentiated chondrogenic cell state, such as a chondrocyte.

[0203] The engineered cell (e.g., the engineered chondrogenic cell) of the present disclosure can be used (e.g., administered) to treat a subject in need thereof. The subject can have or can be suspected of having a condition, such as a disease (e.g., cancer). A cell (e.g., a stem cell or a differentiated cell) can be obtained from the subject and such cell can be cultured ex vivo and genetically modified to generate any subject engineered cell (e.g. a chondrogenic cell) as disclosed herein. Subsequently, the engineered immune cell can be administered to the subject for adaptive immunotherapy. Thus, the engineered cell can be autologous to the subject in need thereof. Alternatively, the engineered cell can be allogeneic to the subject (e.g., allogeneic stem cell transplantation, allogeneic adoptive immunotherapy, etc.).

[0204] The engineered cells as disclosed herein can be administered to the subject prior to, concurrently with, or subsequent to activation of the heterologous genetic circuit(s) in the engineered stem cells. For example, the engineered cells can be activated subsequent to being administered into the subject, e.g., by administering to the subject an activator of the heterologous genetic circuit(s).

[0205] The subject can be treated (e.g., administered with) a population of engineered cells (e.g., engineered muscle cells) of the present disclosure for at least or up to about 1 dose, at least or up to about 2 doses, at least or up to about 3 doses, at least or up to about 4 doses, at least or up to about 5 doses, at least or up to about 6 doses, at least or up to about 7 doses, at least or up to about 8 doses, at least or up to about 9 doses, or at least or up to about 10 doses. Alternatively, or in addition to, the subject can be treated (e.g., administered with) a population of engineered cells (e.g., engineered T cells) of the present disclosure for at least about 1 week, at least about 2 weeks, at least about 3 weeks, at least about 4 weeks, at least about 5 weeks, at least about 6 weeks, at least about 2 months, at least about 3 months, at least about 4 months, at least about 5 months, at least about 6 months, at least about 7 months, at least about 8 months, at least about 9 months, at least about 10 months, at least about 11 months, at least about 1 year, at least about 2 years, at least about 3 years, at least about 4 years, at least about 5 years, at least about 6 years, at least about 7 years, at least about 8 years, at least about 9 years, at least about 10 years, at least about 15 years, at least about 20 years, at least about 30 years, at least about 40 years, at least about 50 years, at least about 60 years, at least about 70 years, at least about 80 years, at least about 90 years, or at least about 100 years.

[0206] Any one of the methods disclosed herein can be utilized to treat a target cell, a target tissue, a target condition, or a target disease of a subject.

[0207] The target disease of a subject can be a disease which affects the cartilage. A disease which affects cartilage can include, but is not limited to, arthritis (e.g., osteoarthritis, rheumatoid arthritis, juvenile idiopathic arthritis), gout, systemic lupus erythematosus, seronegative spondyloarthropathies, costochondritis, herniation, achondroplasia, or polychondritis. The target condition of a subject can be injury (e.g., a joint injury such as a knee injury).

[0208] The target disease of the subject can be cancer or tumor. Non-limiting examples of cancer can include cells of cancers including Acanthoma, Acinic cell carcinoma, Acoustic neuroma, Acral lentiginous melanoma, Acrospiroma, Acute eosinophilic leukemia, Acute lymphoblastic leukemia, Acute megakaryoblastic leukemia, Acute monocytic leukemia, Acute myeloblastic leukemia with maturation, Acute myeloid dendritic cell leukemia, Acute myeloid leukemia, Acute promyelocytic leukemia, Adamantinoma, Adenocarcinoma, Adenoid cystic carcinoma, Adenoma, Adenomatoid odontogenic tumor, Adrenocortical carcinoma, Adult T-cell leukemia, Aggressive NK-cell leukemia, AIDS-Related Cancers, AIDS-related lymphoma, Alveolar soft part sarcoma, Ameloblastic fibroma, Anal cancer, Anaplastic large cell lymphoma, Anaplastic thyroid cancer, Angioimmunoblastic T-cell lymphoma, Angiomyolipoma, Angiosarcoma, Appendix cancer, Astrocytoma, Atypical teratoid rhabdoid tumor, Basal cell carcinoma, Basal-like carcinoma, B-cell leukemia, B-cell lymphoma, Bellini duct carcinoma, Biliary tract cancer, Bladder cancer, Blastoma, Bone Cancer, Bone tumor, Brain Stem Glioma, Brain Tumor, Breast Cancer, Brenner tumor, Bronchial Tumor, Bronchioloalveolar carcinoma, Brown tumor, Burkitt's lymphoma, Cancer of Unknown Primary Site, Carcinoid Tumor, Carcinoma, Carcinoma in situ, Carcinoma of the penis, Carcinoma of Unknown Primary Site, Carcinosarcoma, Castleman's Disease, Central Nervous System Embryonal Tumor, Cerebellar Astrocytoma, Cerebral Astrocytoma, Cervical Cancer, Cholangiocarcinoma, Chondroma, Chondrosarcoma, Chordoma, Choriocarcinoma, Choroid plexus papilloma, Chronic Lymphocytic Leukemia, Chronic monocytic leukemia, Chronic myelogenous leukemia, Chronic Myeloproliferative Disorder, Chronic neutrophilic leukemia, Clear-cell tumor, Colon Cancer, Colorectal cancer, Craniopharyngioma, Cutaneous T-cell lymphoma, Degos disease, Dermatofibrosarcoma protuberans, Dermoid cyst, Desmoplastic small round cell tumor, Diffuse large B cell lymphoma, Dysembryoplastic neuroepithelial tumor, Embryonal carcinoma, Endodermal sinus tumor, Endometrial cancer, Endometrial Uterine Cancer, Endometrioid tumor, Enteropathy-associated T-cell lymphoma, Ependymoblastoma, Ependymoma, Epithelioid sarcoma, Erythroleukemia, Esophageal cancer, Esthesioneuroblastoma, Ewing Family of Tumor, Ewing Family Sarcoma, Ewing's sarcoma, Extracranial Germ Cell Tumor, Extragonadal Germ Cell Tumor, Extrahepatic Bile Duct Cancer, Extramammary Paget's disease, Fallopian tube cancer, Fetus in fetu, Fibroma, Fibrosarcoma, Follicular lymphoma, Follicular thyroid cancer, Gallbladder Cancer, Gallbladder cancer, Ganglioglioma, Ganglioneuroma, Gastric Cancer, Gastric lymphoma, Gastrointestinal cancer, Gastrointestinal Carcinoid Tumor, Gastrointestinal Stromal Tumor, Gastrointestinal stromal tumor, Germ cell tumor, Germinoma, Gestational choriocarcinoma, Gestational Trophoblastic Tumor, Giant cell tumor of bone, Glioblastoma multiforme, Glioma, Gliomatosis cerebri, Glomus tumor, Glucagonoma, Gonadoblastoma, Granulosa cell tumor, Hairy Cell Leukemia, Hairy cell leukemia, Head and Neck Cancer, Head and neck cancer, Heart cancer, Hemangioblastoma, Hemangiopericytoma, Hemangiosarcoma, Hematological malignancy, Hepatocellular carcinoma, Hepatosplenic T-cell lymphoma, Hereditary breast-ovarian cancer syndrome, Hodgkin Lymphoma, Hodgkin's lymphoma, Hypopharyngeal Cancer, Hypothalamic Glioma, Inflammatory breast cancer, Intraocular Melanoma, Islet cell carcinoma, Islet Cell Tumor, Juvenile myelomonocytic leukemia, Kaposi Sarcoma, Kaposi's sarcoma, Kidney Cancer, Klatskin tumor, Krukenberg tumor, Laryngeal Cancer, Laryngeal cancer, Lentigo maligna melanoma, Leukemia, Leukemia, Lip and Oral Cavity Cancer, Liposarcoma, Lung cancer, Luteoma, Lymphangioma, Lymphangiosarcoma, Lymphoepithelioma, Lymphoid leukemia, Lymphoma, Macroglobulinemia, Malignant Fibrous Histiocytoma, Malignant fibrous histiocytoma, Malignant Fibrous Histiocytoma of Bone, Malignant Glioma, Malignant Mesothelioma, Malignant peripheral nerve sheath tumor, Malignant rhabdoid tumor, Malignant triton tumor, MALT lymphoma, Mantle cell lymphoma, Mast cell leukemia, Mediastinal germ cell tumor, Mediastinal tumor, Medullary thyroid cancer, Medulloblastoma, Medulloblastoma, Medulloepithelioma, Melanoma, Melanoma, Meningioma, Merkel Cell Carcinoma, Mesothelioma, Mesothelioma, Metastatic Squamous Neck Cancer with Occult Primary, Metastatic urothelial carcinoma, Mixed Mullerian tumor, Monocytic leukemia, Mouth Cancer, Mucinous tumor, Multiple Endocrine Neoplasia Syndrome, Multiple Myeloma, Multiple myeloma, Mycosis Fungoides, Mycosis fungoides, Myelodysplastic Disease, Myelodysplastic Syndromes, Myeloid leukemia, Myeloid sarcoma, Myeloproliferative Disease, Myxoma, Nasal Cavity Cancer, Nasopharyngeal Cancer, Nasopharyngeal carcinoma, Neoplasm, Neurinoma, Neuroblastoma, Neuroblastoma, Neurofibroma, Neuroma, Nodular melanoma, Non-Hodgkin Lymphoma, Non-Hodgkin lymphoma, Nonmelanoma Skin Cancer, Non-Small Cell Lung Cancer, Ocular oncology, Oligoastrocytoma, Oligodendroglioma, Oncocytoma, Optic nerve sheath meningioma, Oral Cancer, Oral cancer, Oropharyngeal Cancer, Osteosarcoma, Osteosarcoma, Ovarian Cancer, Ovarian cancer, Ovarian Epithelial Cancer, Ovarian Germ Cell Tumor, Ovarian Low Malignant Potential Tumor, Paget's disease of the breast, Pancoast tumor, Pancreatic Cancer, Pancreatic cancer, Papillary thyroid cancer, Papillomatosis, Paraganglioma, Paranasal Sinus Cancer, Parathyroid Cancer, Penile Cancer, Perivascular epithelioid cell tumor, Pharyngeal Cancer, Pheochromocytoma, Pineal Parenchymal Tumor of Intermediate Differentiation, Pineoblastoma, Pituicytoma, Pituitary adenoma, Pituitary tumor, Plasma Cell Neoplasm, Pleuropulmonary blastoma, Polyembryoma, Precursor T-lymphoblastic lymphoma, Primary central nervous system lymphoma, Primary effusion lymphoma, Primary Hepatocellular Cancer, Primary Liver Cancer, Primary peritoneal cancer, Primitive neuroectodermal tumor, Prostate cancer, Pseudomyxoma peritonei, Rectal Cancer, Renal cell carcinoma, Respiratory Tract Carcinoma Involving the NUT Gene on Chromosome 15, Retinoblastoma, Rhabdomyoma, Rhabdomyosarcoma, Richter's transformation, Sacrococcygeal teratoma, Salivary Gland Cancer, Sarcoma, Schwannomatosis, Sebaceous gland carcinoma, Secondary neoplasm, Seminoma, Serous tumor, Sertoli-Leydig cell tumor, Sex cord-stromal tumor, Sezary Syndrome, Signet ring cell carcinoma, Skin Cancer, Small blue round cell tumor, Small cell carcinoma, Small Cell Lung Cancer, Small cell lymphoma, Small intestine cancer, Soft tissue sarcoma, Somatostatinoma, Soot wart, Spinal Cord Tumor, Spinal tumor, Splenic marginal zone lymphoma, Squamous cell carcinoma, Stomach cancer, Superficial spreading melanoma, Supratentorial Primitive Neuroectodermal Tumor, Surface epithelial-stromal tumor, Synovial sarcoma, T-cell acute lymphoblastic leukemia, T-cell large granular lymphocyte leukemia, T-cell leukemia, T-cell lymphoma, T-cell prolymphocytic leukemia, Teratoma, Terminal lymphatic cancer, Testicular cancer, Thecoma, Throat Cancer, Thymic Carcinoma, Thymoma, Thyroid cancer, Transitional Cell Cancer of Renal Pelvis and Ureter, Transitional cell carcinoma, Urachal cancer, Urethral cancer, Urogenital neoplasm, Uterine sarcoma, Uveal melanoma, Vaginal Cancer, Verner Morrison syndrome, Verrucous carcinoma, Visual Pathway Glioma, Vulvar Cancer, Waldenstrom's macroglobulinemia, Warthin's tumor, Wilms' tumor, and combinations thereof. In some embodiments, the targeted cancer cell represents a subpopulation within a cancer cell population, such as a cancer stem cell. In some embodiments, the cancer is of a hematopoietic lineage, such as a lymphoma. The antigen can be a tumor associated antigen.

[0209] Non-limiting examples of the target tissue can include cells, for example chondrogenic cells, can be obtained from a subject. Non-limiting examples of subjects include humans, dogs, cats, mice, rats, and transgenic species thereof. Examples of samples from a subject from which cells can be derived include, without limitation, skin, heart, lung, kidney, bone marrow, breast, pancreas, liver, muscle, smooth muscle, bladder, gall bladder, colon, intestine, brain, prostate, esophagus, thyroid, serum, saliva, urine, gastric and digestive fluid, tears, stool, semen, vaginal fluid, interstitial fluids derived from tumorous tissue, ocular fluids, sweat, mucus, earwax, oil, glandular secretions, spinal fluid, hair, fingernails, plasma, nasal swab or nasopharyngeal wash, spinal fluid, cerebral spinal fluid, tissue, throat swab, biopsy, placental fluid, amniotic fluid, cord blood, emphatic fluids, cavity fluids, sputum, pus, microbiota, meconium, breast milk, and/or other excretions or body tissues.

[0210] The present disclosure also provides a composition comprising the engineered genetic circuit(s) as disclosed herein. The composition can further comprise the actuator of the heterologous genetic circuit(s). The present disclosure also provides a kit comprising the composition. The kit can further comprise the activator(s) of the heterologous genetic circuit(s). The activator(s) can be in the same composition as the engineered cells. Alternatively or in addition to, the activator(s) can be in a different and separate composition from the engineered cells.

[0211] In some cases, the engineered progenitor cells disclosed herein can exhibit (i) comparable or enhanced regenerative capacity; (ii) comparable or enhanced in vitro expression; (iii) comparable or enhanced genetic editing capabilities; (iv) comparable or enhanced immunotolerance; (v) comparable or shorter manufacturing timelines; (vi) comparable or fewer growth factor or culturing requirements; and/or (vii) comparable or enhanced safety, as compared to a control progenitor cell.

[0212] The control progenitor cell can be generated by any method comprising expansion of a progenitor cell (e.g., chondroprogenitor cell) isolated from a tissue, directed iPSC differentiation (e.g., using exogenous growth factors), and/or transgenic iPSC differentiation (e.g., viral transduction of heterologous genes).

[0213] In some cases, the tissue-specific progenitor cells can be stored in a receptacle (e.g., a sterilized vial). In some cases, the tissue-specific progenitor cells are stored at a temperature of at most about 10° C., at most about 5° C., at most about 4° C., at most about 0° C., at most about −5° C., at most about −10° C., at most about −20° C., at most about −30° C., at most about −40° C., at most about-50° C., at most about −60° C., at most about −70° C., at most about −80° C., at most about −90° C., at most about −100° C., at most about −110° C., at most about −120° C., at most about −130° C., at most about −140° C., at most about −150° C., at most about −160° C., at most about −170° C., at most about −180° C., at most about −190° C., at most about −200° C., or colder.

### Pharmaceutical Compositions

[0214] In some cases, methods disclosed herein comprise administering at least one of the tissue-specific progenitor cells to a subject in need thereof. A subject can be an animal. A subject can be a mammal (e.g., a primate, a horse, a cat, a dog, a cow, a pig, a sheep, a goat, a mouse, a rabbit, a rat, a guinea pig). A subject can be a human subject.

[0215] A pharmaceutical composition of the disclosure can be a combination of any pharmaceutical compounds described herein with other chemical components, such as carriers, stabilizers, diluents, dispersing agents, suspending agents, thickening agents, and/or excipients. The pharmaceutical composition facilitates administration of the compound to an organism. Pharmaceutical compositions can be administered in therapeutically-effective amounts as pharmaceutical compositions by various forms and routes including, for example, intravenous, subcutaneous, intramuscular, inhalation, oral, parenteral, ophthalmic, otic, subcutaneous, transdermal, nasal, intravitreal, intratracheal, intrapulmonary, transmucosal, vaginal, and topical administration.

[0216] Formulations can be modified depending upon the route of administration chosen. Pharmaceutical compositions comprising a compound described herein can be manufactured, for example, by mixing, dissolving, emulsifying, encapsulating, entrapping, or compression processes.

### EXAMPLES

### Example 1: Differentiation of Chondrogenic Progenitor Cells

[0217] Tissue-specific cells (e.g., chondroprogenitor cells) can be generated from less-differentiated cells (e.g., stem cells, such as iPSCs) by the systems and methods of the present disclosure.

### A. Generation of Chondroprogenitor Cells.

[0218] In this example, mesodermal stem cells (MSCs) were formed into chondroprogenitor cells using heterologous genetic circuits. Differentiation of a stem cell (e.g., MSC) to a chondroprogenitor cell can be a complex process requiring turning on a plurality of endogenous genes at different time points, while turning off a plurality of endogenous genes at different time points. See FIG. 2A for examples of different endogenous genes that are induced for expression at different stages of a differentiation of a stem cell to a chondroprogenitor cell, then to a chondrocyte. Thus, one or more heterologous genetic circuits as disclosed herein can be utilized to automatically promote regulation of such cascade of different endogenous gene expressions. In some cases, each heterologous genetic circuit can be configured to regulate expression levels of a plurality of genes at a plurality of different time points upon a single activation of such heterologous genetic circuit.

[0219] The MSCs were transiently transfected with plasmid DNAs encoding one of the heterologous genetic circuits as described in FIG. 2B or FIG. 3, e.g., targeting a combination of TBXT, MIXL1, TBX6, MSGN1, UNCX, TCF15, PAX9, SOX6, SOX9, PAX3, PAX7, and COL2A1. All genes targeted were activated. Flow cytometry was used to analyze for CD146/CD73 double positive cells, CD146/CD112 double positive cells, and CD326/CD309 double negative cells, each of which indicated the formation of chondrogenic progenitor cells (FIGS. 6A-6B). Top performing HCGs, such as Cellgorithm 10, were found to convert about 60% of cells into chondrogenic progenitor cells in four days (FIG. 6C).

### B. Characterization of Chondroprogenitor Cells Generated by a Heterologous Genetic Circuit.

[0220] Transient plasmid delivery of the heterologous genetic circuits induced double positive and double negative chondrogenic progenitor cell markers to appear after four days. As shown in FIG. 6C, flow analysis revealed that at least one of the heterologous genetic circuits, heterologous genetic circuit 10 (e.g., Cellgorithm 10), provided in FIG. 3 yielded at least about 60% MSC to chondroprogenitor cell conversion in four days. This conversion rate was greater than a control population of iPSCs that were treated by activating the same endogenous genes, but all at the same time.

[0221] Separately, cells treated with various heterologous genetic circuits from FIG. 3 were analyzed (e.g., via flow) for the positive markers of chondroprogenitor cells (e.g., CD146+/CD73+, CD146+/CD73+, CD326−/CD309−, etc.), then plotted in a volcano plot, as shown in FIG. 4. The volcano plot was generated to compare the efficiency of each heterologous genetic circuit in terms of (i) statistical significance (p-value) as compared to the all-at-once control circuit that activated the target endogenous genes at once, versus (ii) magnitude of change (fold change) of the positive markers of chondroprogenitor cells as compared to the all-at-once control circuit.

[0222] FIGS. 5A-5D show representative data utilized in the volcano plot of FIG. 4. In each plot of FIGS. 5A-5D, the y-axis represents proportion of each cell sample that express the indicated chondroprogenitor cell markers (e.g., CD146+/CD73+, CD146+/CD73+, BMPR1+, or CD326−/CD309−) upon treatment with one of the heterologous genetic circuits from FIG. 3. The x-axis indicates which heterologous genetic circuit was utilized for each cell sample. The plots in FIGS. 5A-5D show that various heterologous genetic circuits (e.g., Cellgorithm 9, Cellgorithm 10, Cellgorithm 12, etc.) can generate chondroprogenitor cells as indicated by multiple chondroprogenitor cell marker panels.

### Example 2: Chondrogenesis Assays

[0223] In this prophetic example, iPSCs and mesenchymal cells are contacted with top-performing HGCs from Example 1 and allowed to grow in media until chondrocytes form. Control chondrocyte populations are collected and purified from mouse samples. Chondrocytes from both the HGC and control populations are tested for chondrogenesis, including amount of cartilage formed and the mechanical properties of the cartilage tested.

### Example 3: Implantation and Engraftment of Chondrogenic Progenitor Cells

[0224] Tissue-specific cells (e.g., chondroprogenitor cells) as prepared by the systems and methods of the present disclosure can be administered to a subject in need thereof (e.g., injected into a joint tissue), to treat a joint-related disorder or a cartilage-related disorder of a subject.

### A. Generation of Chondroprogenitor Cells.

[0225] Stem cells (e.g., MPSCs) can be transduced or transfected (e.g., transiently transfected) with one or more heterologous genes (e.g., plasmid DNAs) encoding a at least one heterologous genetic circuit, such as, for example, one of the respective heterologous genetic circuit as shown in FIG. 3, in accordance with the methods described in Example 1, in order to generate chondroprogenitor cells.

### B. In Vivo Administration of Chondroprogenitor Cells.

[0226] Upon generation of chondroprogenitor cells by systems and methods of the present disclosure, the chondroprogenitor cells (e.g., CD146 cells) can be purified using anti-CD146 antibody. Cells can be concentrated and resuspended in a buffer (e.g., PBS), and then be administered to mice via injection directly into the joint or other site of interest. After 8 to 10 weeks, the mice can be sacrificed, and the tissue surrounding the area of injection can be sectioned. Sections can be immunostained for human cartilage to confirm the engraftment of the ex vivo-generated chondroprogenitor cells.

[0227] An additional protocol for chondroprogenitor cell transplantation is provided herein. Upon generation as described herein, the chondroprogenitor cells can be suspended in chondrogenic cell media. These cells can be transplanted into a target site in a joint with or without further expansion. For expansion, the chondroprogenitor cells can be plated into tissue culture wells containing hydrogels (flat or patterned) or thin gel coated plastic (flat or patterned) as sparse cultures (e.g., 1000-2000 cells/well of a 24 well size plate) and cultured while replacing media every 3 days. On the day of transplantation, NOD/SCID mice can be anesthetized by intraperitoneal injection of Ketamine (2.4 mg/mouse) and Xylazine (240 g/mouse) and hindlimb irradiated as previously described (A. Sacco et al. (2008) Nature 456, 502). The generated chondroprogenitor cells can be counted and resuspended, and subsequently injected into recipient mice.

[0228] Engraftment (e.g., differentiation and integration into the local chondrogenic tissue) of the transplanted chondroprogenitor cells can be visualized by various methods. For example, the chondroprogenitor cells can be engineered to express a heterologous marker (e.g., fluorescent proteins, such as green fluorescent protein) that is not present in the transplanted animal. Alternatively or in addition to, the chondroprogenitor cells can be allogeneic to the animal, such that any cartilage that are differentiated from the chondroprogenitor cells upon the transplantation can be identified (e.g., immunostaining) by an antigen that is not found in the transplanted animal.

### Example 4: Creating Chondrogenic Cells In Vitro

[0229] For an improved cell manufacturing, cells of interest can be engineered to exhibit increased expression of genes that will alter their phenotype into the chondrogenic cell lineage. In some embodiments, improved cell manufacturing can be evidenced by shorter time to differentiate stem cells (e.g., pluripotent stem cells) to target cells (e.g., chondrogenic precursor or chondrogenic cells), increased number of target cells as compared to other protocols, enhanced level of cartilage formation as evidenced by collagen, aggrecan, and/or ECM protein production, lower cost to produce a similar number of target cells, and more. Upon nucleofection of a Cellgorithm into the cells of interest these genes will be sequentially expressed within the cell of interest The cells of interest can be induced pluripotent stem cells. Cells post engineering can exhibit increased presence of markers of the chondrogenic cell lineage by measurements of RNA transcription, can exhibit DNA accessibility indicative of cells in the chondrogenic cell lineage, and/or increased function in cartilage formation assays measuring 1) collagen, aggrecan, and desired ECM protein production 2) cartilage pellet formation whereby the cartilage pellets express desired levels of collagen, aggrecan, and desired ECM proteins.

[0230] For example a library of Cellgorithms including but not limited to Cellgorithms labeled in Table 1 which are built from sequences with core function units described in SEQ ID NOs: 1-1932 can be introduced to cells of interest. Table 1 shows 1932 unique chondro constructs (e.g., There are 23 unique stem combinations. There are 21 unique “4-pools” of chondro spacers. There are 4 pools because for each gene all 4 constructs targeting that gene are used together. Therefore, there are 21*23=483 different combinations If each individual construct is counted, multiply by 4. There are 483*4=1932 unique chondro constructs).

### Example 5: In Vivo Validation of Cellgorithm-Derived Chondrogenic Cells

[0231] Chondrogenic cells generated using Cellgorithm technology can be used as a regenerative therapy for individuals with defective cartilage function, cartilage damage, or arthritic cartilage. The delivery of these cells into such individuals can provide an alleviation of pain in the associated joints, improved joint function, and improved longevity of the function in respective treated joints. Once produced by Cellgorithm-driven instructions, the chondrogenic cells can be used in the same manner as chondrogenic cells produced by other methods, such as isolation from cadaveric donors, or differentiation of pluripotent stem cells using protocols for changing growth factors and other small molecules over a period of time (so called directed differentiation). Regardless of their origin, chondrogenic cells can be evaluated and used in vivo by injecting them into the joints of animal models, whereby the joint bad undergone acute cartilage injury or it had arthritis via genetic model or induction. Chondrogenic cells can be phenotypically characterized based on gene expression and cell surface marker characteristics, and can be functionally characterized for their ability to create cartilage. Both in vitro and in vivo characterizations provide significant insight into the quality of the chondrogenic cells.

[0232] To evaluate function of the produced chondrogenic cells can be implanted into osteochondral defected knee joints (e.g., of full thickness, 1 mm in diameter) of athymic rats (e.g., n=6) or 6 month old Yucatan pigs. Following transplantation of chondrogenic cells, histology can be performed to measure genes of interest (e.g., COL2A1, COL2A2, COL10, AGGN) and extracellular matrix proteins of interest. The chondrogenic cells should engraft to create cartilage expressing these proteins beyond the vehicle control, providing healing of the defected cartilage that translates to functional joint outcomes.

TABLE 1
Concatenated proGuide Sequences

| Gene | | |
|---|---|---|
| target | seq | |
| (if app- | id | |
| licable) | no: | full sequence |
| ACAN | 1 | g-TGTGACACATACAT-GTTTTAGAGCTA- |
| | | CCGTCGTTGTACCGTCTACTTGAC- |
| | | TTTTTTTTcagccaactccaaTTTTTTTT- |
| | | GTCAAGTAGACGGTACAACGACGG |
| ACAN | 2 | -GGGCGGCCGACAGG-GTTTTAGAGCTA- |
| | | CCGTCGTTGTACCGTCTACTTGAC- |
| | | TTTTTTTTcagccaactccaaTTTTTTTT- |
| | | GTCAAGTAGACGGTACAACGACGG |
| ACAN | 3 | -GTGCCCGGACTCTG-GTTTTAGAGCTA- |
| | | CCGTCGTTGTACCGTCTACTTGAC- |
| | | TTTTTTTTcagccaactccaaTTTTTTTT- |
| | | GTCAAGTAGACGGTACAACGACGG |
| ACAN | 4 | g-CCCTGGCTCCGGAC-GTTTTAGAGCTA- |
| | | CCGTCGTTGTACCGTCTACTTGAC- |
| | | TTTTTTTTcagccaactccaaTTTTTTTT- |
| | | GTCAAGTAGACGGTACAACGACGG |
| ACAN | 5 | g-TGTGACACATACAT-GTTTTAGAGCTA- |
| | | CCTTCCCGACTTCCGTAGGAGCGC- |
| | | TTTTTTTTcagccaactccaaTTTTTTTT- |
| | | GCGCTCCTACGGAAGTCGGGAAGG |
| ACAN | 6 | -GGGCGGCCGACAGG-GTTTTAGAGCTA- |
| | | CCTTCCCGACTTCCGTAGGAGCGC- |
| | | TTTTTTTTcagccaactccaaTTTTTTTT- |
| | | GCGCTCCTACGGAAGTCGGGAAGG |
| ACAN | 7 | -GTGCCCGGACTCTG-GTTTTAGAGCTA- |
| | | CCTTCCCGACTTCCGTAGGAGCGC- |
| | | TTTTTTTTcagccaactccaaTTTTTTTT- |
| | | GCGCTCCTACGGAAGTCGGGAAGG |
| ACAN | 8 | g-CCCTGGCTCCGGAC-GTTTTAGAGCTA- |
| | | CCTTCCCGACTTCCGTAGGAGCGC- |
| | | TTTTTTTTcagccaactccaaTTTTTTTT- |
| | | GCGCTCCTACGGAAGTCGGGAAGG |
| ACAN | 9 | g-TGTGACACATACAT-GTTTTAGAGCTA- |
| | | CCTGAAGGTAAAGATCGGGTCCTC- |
| | | TTTTTTTTcagccaactccaaTTTTTTTT- |
| | | GAGGACCCGATCTTTACCTTCAGG |
| ACAN | 10 | -GGGCGGCCGACAGG-GTTTTAGAGCTA- |
| | | CCTGAAGGTAAAGATCGGGTCCTC- |
| | | TTTTTTTTcagccaactccaaTTTTTTTT- |
| | | GAGGACCCGATCTTTACCTTCAGG |
| ACAN | 11 | -GTGCCCGGACTCTG-GTTTTAGAGCTA- |
| | | CCTGAAGGTAAAGATCGGGTCCTC- |
| | | TTTTTTTTcagccaactccaaTTTTTTTT- |
| | | GAGGACCCGATCTTTACCTTCAGG |
| ACAN | 12 | g-CCCTGGCTCCGGAC-GTTTTAGAGCTA- |
| | | CCTGAAGGTAAAGATCGGGTCCTC- |
| | | TTTTTTTTcagccaactccaaTTTTTTTT- |
| | | GAGGACCCGATCTTTACCTTCAGG |
| ACAN | 13 | g-TGTGACACATACAT-GTTTTAGAGCTA- |
| | | CCTGGTTATAGCGGACGCACTGT- |
| | | TTTTTTTTcagccaactccaaTTTTTTTT- |
| | | ACAGTGCGTCCGCTATAACCAGG |
| ACAN | 14 | -GGGCGGCCGACAGG-GTTTTAGAGCTA- |
| | | CCTGGTTATAGCGGACGCACTGT- |
| | | TTTTTTTTcagccaactccaaTTTTTTTT- |
| | | ACAGTGCGTCCGCTATAACCAGG |
| ACAN | 15 | -GTGCCCGGACTCTG-GTTTTAGAGCTA- |
| | | CCTGGTTATAGCGGACGCACTGT- |
| | | TTTTTTTTcagccaactccaaTTTTTTTT- |
| | | ACAGTGCGTCCGCTATAACCAGG |
| ACAN | 16 | g-CCCTGGCTCCGGAC-GTTTTAGAGCTA- |
| | | CCTGGTTATAGCGGACGCACTGT- |
| | | TTTTTTTTcagccaactccaaTTTTTTTT- |
| | | ACAGTGCGTCCGCTATAACCAGG |
| ACAN | 17 | g-TGTGACACATACAT-GTTTTAGAGCTA- |
| | | CCGCATCGTATTATCTGCGAAGC- |
| | | TTTTTTTTcagccaactccaaTTTTTTTT- |
| | | GCTTCGCAGATAATACGATGCGG |
| ACAN | 18 | -GGGCGGCCGACAGG-GTTTTAGAGCTA- |
| | | CCGCATCGTATTATCTGCGAAGC- |
| | | TTTTTTTTcagccaactccaaTTTTTTTT- |
| | | GCTTCGCAGATAATACGATGCGG |
| ACAN | 19 | -GTGCCCGGACTCTG-GTTTTAGAGCTA- |
| | | CCGCATCGTATTATCTGCGAAGC- |
| | | TTTTTTTTcagccaactccaaTTTTTTTT- |
| | | GCTTCGCAGATAATACGATGCGG |
| ACAN | 20 | g-CCCTGGCTCCGGAC-GTTTTAGAGCTA- |
| | | CCGCATCGTATTATCTGCGAAGC- |
| | | TTTTTTTTcagccaactccaaTTTTTTTT- |
| | | GCTTCGCAGATAATACGATGCGG |
| ACAN | 21 | g-TGTGACACATACAT-GTTTTAGAGCTA- |
| | | CCGCTAGGACGTTCAACGGAGTC- |
| | | TTTTTTTTcagccaactccaaTTTTTTTT- |
| | | GACTCCGTTGAACGTCCTAGCGG |
| ACAN | 22 | -GGGCGGCCGACAGG-GTTTTAGAGCTA- |
| | | CCGCTAGGACGTTCAACGGAGTC- |
| | | TTTTTTTTcagccaactccaaTTTTTTTT- |
| | | GACTCCGTTGAACGTCCTAGCGG |
| ACAN | 23 | -GTGCCCGGACTCTG-GTTTTAGAGCTA- |
| | | CCGCTAGGACGTTCAACGGAGTC- |
| | | TTTTTTTTcagccaactccaaTTTTTTTT- |
| | | GACTCCGTTGAACGTCCTAGCGG |
| ACAN | 24 | g-CCCTGGCTCCGGAC-GTTTTAGAGCTA- |
| | | CCGCTAGGACGTTCAACGGAGTC- |
| | | TTTTTTTTcagccaactccaaTTTTTTTT- |
| | | GACTCCGTTGAACGTCCTAGCGG |
| ACAN | 25 | g-TGTGACACATACAT-GTTTTAGAGCTA- |
| | | CCATAGCGGTACTATCGGCATCT- |
| | | TTTTTTTTcagccaactccaaTTTTTTTT- |
| | | AGATGCCGATAGTACCGCTATGG |
| ACAN | 26 | -GGGCGGCCGACAGG-GTTTTAGAGCTA- |
| | | CCATAGCGGTACTATCGGCATCT- |
| | | TTTTTTTTcagccaactccaaTTTTTTTT- |
| | | AGATGCCGATAGTACCGCTATGG |
| ACAN | 27 | -GTGCCCGGACTCTG-GTTTTAGAGCTA- |
| | | CCATAGCGGTACTATCGGCATCT- |
| | | TTTTTTTTcagccaactccaaTTTTTTTT- |
| | | AGATGCCGATAGTACCGCTATGG |
| ACAN | 28 | g-CCCTGGCTCCGGAC-GTTTTAGAGCTA- |
| | | CCATAGCGGTACTATCGGCATCT- |
| | | TTTTTTTTcagccaactccaaTTTTTTTT- |
| | | AGATGCCGATAGTACCGCTATGG |
| ACAN | 29 | g-TGTGACACATACAT-GTTTTAGAGCTA- |
| | | CCTCGTACTAGTCTCGCATGACC- |
| | | TTTTTTTTcagccaactccaaTTTTTTTT- |
| | | GGTCATGCGAGACTAGTACGAGG |
| ACAN | 30 | -GGGCGGCCGACAGG-GTTTTAGAGCTA- |
| | | CCTCGTACTAGTCTCGCATGACC- |
| | | TTTTTTTTcagccaactccaaTTTTTTTT- |
| | | GGTCATGCGAGACTAGTACGAGG |
| ACAN | 31 | -GTGCCCGGACTCTG-GTTTTAGAGCTA- |
| | | CCTCGTACTAGTCTCGCATGACC- |
| | | TTTTTTTTcagccaactccaaTTTTTTTT- |
| | | GGTCATGCGAGACTAGTACGAGG |
| ACAN | 32 | g-CCCTGGCTCCGGAC-GTTTTAGAGCTA- |
| | | CCTCGTACTAGTCTCGCATGACC- |
| | | TTTTTTTTcagccaactccaaTTTTTTTT- |
| | | GGTCATGCGAGACTAGTACGAGG |
| ACAN | 33 | g-TGTGACACATACAT-GTTTTAGAGCTA- |
| | | CCGATAGTGCTAAACGACGCTTT- |
| | | TTTTTTTTcagccaactccaaTTTTTTTT- |
| | | AAAGCGTCGTTTAGCACTATCGG |
| ACAN | 34 | -GGGCGGCCGACAGG-GTTTTAGAGCTA- |
| | | CCGATAGTGCTAAACGACGCTTT- |
| | | TTTTTTTTcagccaactccaaTTTTTTTT- |
| | | AAAGCGTCGTTTAGCACTATCGG |
| ACAN | 35 | -GTGCCCGGACTCTG-GTTTTAGAGCTA- |
| | | CCGATAGTGCTAAACGACGCTTT- |
| | | TTTTTTTTcagccaactccaaTTTTTTTT- |
| | | AAAGCGTCGTTTAGCACTATCGG |
| ACAN | 36 | g-CCCTGGCTCCGGAC-GTTTTAGAGCTA- |
| | | CCGATAGTGCTAAACGACGCTTT- |
| | | TTTTTTTTcagccaactccaaTTTTTTTT- |
| | | AAAGCGTCGTTTAGCACTATCGG |
| ACAN | 37 | g-TGTGACACATACAT-GTTTTAGAGCTA- |
| | | CCCGTTATCGACGTTCAAGGAAC- |
| | | TTTTTTTTcagccaactccaaTTTTTTTT- |
| | | GTTCCTTGAACGTCGATAACGGG |
| ACAN | 38 | -GGGCGGCCGACAGG-GTTTTAGAGCTA- |
| | | CCCGTTATCGACGTTCAAGGAAC- |
| | | TTTTTTTTcagccaactccaaTTTTTTTT- |
| | | GTTCCTTGAACGTCGATAACGGG |
| ACAN | 39 | -GTGCCCGGACTCTG-GTTTTAGAGCTA- |
| | | CCCGTTATCGACGTTCAAGGAAC- |
| | | TTTTTTTTcagccaactccaaTTTTTTTT- |
| | | GTTCCTTGAACGTCGATAACGGG |
| ACAN | 40 | g-CCCTGGCTCCGGAC-GTTTTAGAGCTA- |
| | | CCCGTTATCGACGTTCAAGGAAC- |
| | | TTTTTTTTcagccaactccaaTTTTTTTT- |
| | | GTTCCTTGAACGTCGATAACGGG |
| ACAN | 41 | g-TGTGACACATACAT-GTTTTAGAGCTA- |
| | | CCGATCAATGCGGTCTGCGTAAC- |
| | | TTTTTTTTcagccaactccaaTTTTTTTT- |
| | | GTTACGCAGACCGCATTGATCGG |
| ACAN | 42 | -GGGCGGCCGACAGG-GTTTTAGAGCTA- |
| | | CCGATCAATGCGGTCTGCGTAAC- |
| | | TTTTTTTTcagccaactccaaTTTTTTTT- |
| | | GTTACGCAGACCGCATTGATCGG |
| ACAN | 43 | -GTGCCCGGACTCTG-GTTTTAGAGCTA- |
| | | CCGATCAATGCGGTCTGCGTAAC- |
| | | TTTTTTTTcagccaactccaaTTTTTTTT- |
| | | GTTACGCAGACCGCATTGATCGG |
| ACAN | 44 | g-CCCTGGCTCCGGAC-GTTTTAGAGCTA- |
| | | CCGATCAATGCGGTCTGCGTAAC- |
| | | TTTTTTTTcagccaactccaaTTTTTTTT- |
| | | GTTACGCAGACCGCATTGATCGG |
| ACAN | 45 | g-TGTGACACATACAT-GTTTTAGAGCTA- |
| | | CCCTTACTCGCGATACTCTCGAC- |
| | | TTTTTTTTcagccaactccaaTTTTTTTT- |
| | | GTCGAGAGTATCGCGAGTAAGGG |
| ACAN | 46 | -GGGCGGCCGACAGG-GTTTTAGAGCTA- |
| | | CCCTTACTCGCGATACTCTCGAC- |
| | | TTTTTTTTcagccaactccaaTTTTTTTT- |
| | | GTCGAGAGTATCGCGAGTAAGGG |
| ACAN | 47 | -GTGCCCGGACTCTG-GTTTTAGAGCTA- |
| | | CCCTTACTCGCGATACTCTCGAC- |
| | | TTTTTTTTcagccaactccaaTTTTTTTT- |
| | | GTCGAGAGTATCGCGAGTAAGGG |
| ACAN | 48 | g-CCCTGGCTCCGGAC-GTTTTAGAGCTA- |
| | | CCCTTACTCGCGATACTCTCGAC- |
| | | TTTTTTTTcagccaactccaaTTTTTTTT- |
| | | GTCGAGAGTATCGCGAGTAAGGG |
| ACAN | 49 | g-TGTGACACATACAT-GTTTTAGAGCTA- |
| | | CCGCGGACGGTAAGCACGGAATA- |
| | | TTTTTTTTcagccaactccaaTTTTTTTT- |
| | | TATTCCGTGCTTACCGTCCGCGG |
| ACAN | 50 | -GGGCGGCCGACAGG-GTTTTAGAGCTA- |
| | | CCGCGGACGGTAAGCACGGAATA- |
| | | TTTTTTTTcagccaactccaaTTTTTTTT- |
| | | TATTCCGTGCTTACCGTCCGCGG |
| ACAN | 51 | -GTGCCCGGACTCTG-GTTTTAGAGCTA- |
| | | CCGCGGACGGTAAGCACGGAATA- |
| | | TTTTTTTTcagccaactccaaTTTTTTTT- |
| | | TATTCCGTGCTTACCGTCCGCGG |
| ACAN | 52 | g-CCCTGGCTCCGGAC-GTTTTAGAGCTA- |
| | | CCGCGGACGGTAAGCACGGAATA- |
| | | TTTTTTTTcagccaactccaaTTTTTTTT- |
| | | TATTCCGTGCTTACCGTCCGCGG |
| ACAN | 53 | g-TGTGACACATACAT-GTTTTAGAGCTA- |
| | | CCTATAGTCACGAATCGTAGGGT- |
| | | TTTTTTTTcagccaactccaaTTTTTTTT- |
| | | ACCCTACGATTCGTGACTATAGG |
| ACAN | 54 | -GGGCGGCCGACAGG-GTTTTAGAGCTA- |
| | | CCTATAGTCACGAATCGTAGGGT- |
| | | TTTTTTTTcagccaactccaaTTTTTTTT- |
| | | ACCCTACGATTCGTGACTATAGG |
| ACAN | 55 | -GTGCCCGGACTCTG-GTTTTAGAGCTA- |
| | | CCTATAGTCACGAATCGTAGGGT- |
| | | TTTTTTTTcagccaactccaaTTTTTTTT- |
| | | ACCCTACGATTCGTGACTATAGG |
| ACAN | 56 | g-CCCTGGCTCCGGAC-GTTTTAGAGCTA- |
| | | CCTATAGTCACGAATCGTAGGGT- |
| | | TTTTTTTTcagccaactccaaTTTTTTTT- |
| | | ACCCTACGATTCGTGACTATAGG |
| ACAN | 57 | g-TGTGACACATACAT-GTTTTAGAGCTA- |
| | | CCCGTCGTCACGTATGCGTAGCA- |
| | | TTTTTTTTcagccaactccaaTTTTTTTT- |
| | | TGCTACGCATACGTGACGACGGG |
| ACAN | 58 | -GGGCGGCCGACAGG-GTTTTAGAGCTA- |
| | | CCCGTCGTCACGTATGCGTAGCA- |
| | | TTTTTTTTcagccaactccaaTTTTTTTT- |
| | | TGCTACGCATACGTGACGACGGG |
| ACAN | 59 | -GTGCCCGGACTCTG-GTTTTAGAGCTA- |
| | | CCCGTCGTCACGTATGCGTAGCA- |
| | | TTTTTTTTcagccaactccaaTTTTTTTT- |
| | | TGCTACGCATACGTGACGACGGG |
| ACAN | 60 | g-CCCTGGCTCCGGAC-GTTTTAGAGCTA- |
| | | CCCGTCGTCACGTATGCGTAGCA- |
| | | TTTTTTTTcagccaactccaaTTTTTTTT- |
| | | TGCTACGCATACGTGACGACGGG |
| ACAN | 61 | g-TGTGACACATACAT-GTTTTAGAGCTA- |
| | | CCCGAGAGGTAGTAGACGACGCA- |
| | | TTTTTTTTcagccaactccaaTTTTTTTT- |
| | | TGCGTCGTCTACTACCTCTCGGG |
| ACAN | 62 | -GGGCGGCCGACAGG-GTTTTAGAGCTA- |
| | | CCCGAGAGGTAGTAGACGACGCA- |
| | | TTTTTTTTcagccaactccaaTTTTTTTT- |
| | | TGCGTCGTCTACTACCTCTCGGG |
| ACAN | 63 | -GTGCCCGGACTCTG-GTTTTAGAGCTA- |
| | | CCCGAGAGGTAGTAGACGACGCA- |
| | | TTTTTTTTcagccaactccaaTTTTTTTT- |
| | | TGCGTCGTCTACTACCTCTCGGG |
| ACAN | 64 | g-CCCTGGCTCCGGAC-GTTTTAGAGCTA- |
| | | CCCGAGAGGTAGTAGACGACGCA- |
| | | TTTTTTTTcagccaactccaaTTTTTTTT- |
| | | TGCGTCGTCTACTACCTCTCGGG |
| ACAN | 65 | g-TGTGACACATACAT-GTTTTAGAGCTA- |
| | | CCGACGTCTACGGACGGGAGCTA- |
| | | TTTTTTTTcagccaactccaaTTTTTTTT- |
| | | TAGCTCCCGTCCGTAGACGTCGG |
| ACAN | 66 | -GGGCGGCCGACAGG-GTTTTAGAGCTA- |
| | | CCGACGTCTACGGACGGGAGCTA- |
| | | TTTTTTTTcagccaactccaaTTTTTTTT- |
| | | TAGCTCCCGTCCGTAGACGTCGG |
| ACAN | 67 | -GTGCCCGGACTCTG-GTTTTAGAGCTA- |
| | | CCGACGTCTACGGACGGGAGCTA- |
| | | TTTTTTTTcagccaactccaaTTTTTTTT- |
| | | TAGCTCCCGTCCGTAGACGTCGG |
| ACAN | 68 | g-CCCTGGCTCCGGAC-GTTTTAGAGCTA- |
| | | CCGACGTCTACGGACGGGAGCTA- |
| | | TTTTTTTTcagccaactccaaTTTTTTTT- |
| | | TAGCTCCCGTCCGTAGACGTCGG |
| ACAN | 69 | g-TGTGACACATACAT-GTTTTAGAGCTA- |
| | | CCAAAGCTCATTCGCGACTGAGC- |
| | | TTTTTTTTcagccaactccaaTTTTTTTT- |
| | | GCTCAGTCGCGAATGAGCTTTGG |
| ACAN | 70 | -GGGCGGCCGACAGG-GTTTTAGAGCTA- |
| | | CCAAAGCTCATTCGCGACTGAGC- |
| | | TTTTTTTTcagccaactccaaTTTTTTTT- |
| | | GCTCAGTCGCGAATGAGCTTTGG |
| ACAN | 71 | -GTGCCCGGACTCTG-GTTTTAGAGCTA- |
| | | CCAAAGCTCATTCGCGACTGAGC- |
| | | TTTTTTTTcagccaactccaaTTTTTTTT- |
| | | GCTCAGTCGCGAATGAGCTTTGG |
| ACAN | 72 | g-CCCTGGCTCCGGAC-GTTTTAGAGCTA- |
| | | CCAAAGCTCATTCGCGACTGAGC- |
| | | TTTTTTTTcagccaactccaaTTTTTTTT- |
| | | GCTCAGTCGCGAATGAGCTTTGG |
| ACAN | 73 | g-TGTGACACATACAT-GTTTTAGAGCTA- |
| | | CCATGGCACGATCGACACGGAGG- |
| | | TTTTTTTTcagccaactccaaTTTTTTTT- |
| | | CCTCCGTGTCGATCGTGCCATGG |
| ACAN | 74 | -GGGCGGCCGACAGG-GTTTTAGAGCTA- |
| | | CCATGGCACGATCGACACGGAGG- |
| | | TTTTTTTTcagccaactccaaTTTTTTTT- |
| | | CCTCCGTGTCGATCGTGCCATGG |
| ACAN | 75 | -GTGCCCGGACTCTG-GTTTTAGAGCTA- |
| | | CCATGGCACGATCGACACGGAGG- |
| | | TTTTTTTTcagccaactccaaTTTTTTTT- |
| | | CCTCCGTGTCGATCGTGCCATGG |
| ACAN | 76 | g-CCCTGGCTCCGGAC-GTTTTAGAGCTA- |
| | | CCATGGCACGATCGACACGGAGG- |
| | | TTTTTTTTcagccaactccaaTTTTTTTT- |
| | | CCTCCGTGTCGATCGTGCCATGG |
| ACAN | 77 | g-TGTGACACATACAT-GTTTTAGAGCTA- |
| | | CCCGAACTCTCTATCGAACGAGT- |
| | | TTTTTTTTcagccaactccaaTTTTTTTT- |
| | | ACTCGTTCGATAGAGAGTTCGGG |
| ACAN | 78 | -GGGCGGCCGACAGG-GTTTTAGAGCTA- |
| | | CCCGAACTCTCTATCGAACGAGT- |
| | | TTTTTTTTcagccaactccaaTTTTTTTT- |
| | | ACTCGTTCGATAGAGAGTTCGGG |
| ACAN | 79 | -GTGCCCGGACTCTG-GTTTTAGAGCTA- |
| | | CCCGAACTCTCTATCGAACGAGT- |
| | | TTTTTTTTcagccaactccaaTTTTTTTT- |
| | | ACTCGTTCGATAGAGAGTTCGGG |
| ACAN | 80 | g-CCCTGGCTCCGGAC-GTTTTAGAGCTA- |
| | | CCCGAACTCTCTATCGAACGAGT- |
| | | TTTTTTTTcagccaactccaaTTTTTTTT- |
| | | ACTCGTTCGATAGAGAGTTCGGG |
| ACAN | 81 | g-TGTGACACATACAT-GTTTTAGAGCTA- |
| | | CCTACACGATAGTGGTCGTGCGC- |
| | | TTTTTTTTcagccaactccaaTTTTTTTT- |
| | | GCGCACGACCACTATCGTGTAGG |
| ACAN | 82 | -GGGCGGCCGACAGG-GTTTTAGAGCTA- |
| | | CCTACACGATAGTGGTCGTGCGC- |
| | | TTTTTTTTcagccaactccaaTTTTTTTT- |
| | | GCGCACGACCACTATCGTGTAGG |
| ACAN | 83 | -GTGCCCGGACTCTG-GTTTTAGAGCTA- |
| | | CCTACACGATAGTGGTCGTGCGC- |
| | | TTTTTTTTcagccaactccaaTTTTTTTT- |
| | | GCGCACGACCACTATCGTGTAGG |
| ACAN | 84 | g-CCCTGGCTCCGGAC-GTTTTAGAGCTA- |
| | | CCTACACGATAGTGGTCGTGCGC- |
| | | TTTTTTTTcagccaactccaaTTTTTTTT- |
| | | GCGCACGACCACTATCGTGTAGG |
| ACAN | 85 | g-TGTGACACATACAT-GTTTTAGAGCTA- |
| | | CCCTGGCGGAACGTTCGAGTAAT- |
| | | TTTTTTTTcagccaactccaaTTTTTTTT- |
| | | ATTACTCGAACGTTCCGCCAGGG |
| ACAN | 86 | -GGGCGGCCGACAGG-GTTTTAGAGCTA- |
| | | CCCTGGCGGAACGTTCGAGTAAT- |
| | | TTTTTTTTcagccaactccaaTTTTTTTT- |
| | | ATTACTCGAACGTTCCGCCAGGG |
| ACAN | 87 | -GTGCCCGGACTCTG-GTTTTAGAGCTA- |
| | | CCCTGGCGGAACGTTCGAGTAAT- |
| | | TTTTTTTTcagccaactccaaTTTTTTTT- |
| | | ATTACTCGAACGTTCCGCCAGGG |
| ACAN | 88 | g-CCCTGGCTCCGGAC-GTTTTAGAGCTA- |
| | | CCCTGGCGGAACGTTCGAGTAAT- |
| | | TTTTTTTTcagccaactccaaTTTTTTTT- |
| | | ATTACTCGAACGTTCCGCCAGGG |
| ACAN | 89 | g-TGTGACACATACAT-GTTTTAGAGCTA- |
| | | CCTACACTCGACATCGGTAGCTA- |
| | | TTTTTTTTcagccaactccaaTTTTTTTT- |
| | | TAGCTACCGATGTCGAGTGTAGG |
| ACAN | 90 | -GGGCGGCCGACAGG-GTTTTAGAGCTA- |
| | | CCTACACTCGACATCGGTAGCTA- |
| | | TTTTTTTTcagccaactccaaTTTTTTTT- |
| | | TAGCTACCGATGTCGAGTGTAGG |
| ACAN | 91 | -GTGCCCGGACTCTG-GTTTTAGAGCTA- |
| | | CCTACACTCGACATCGGTAGCTA- |
| | | TTTTTTTTcagccaactccaaTTTTTTTT- |
| | | TAGCTACCGATGTCGAGTGTAGG |
| ACAN | 92 | g-CCCTGGCTCCGGAC-GTTTTAGAGCTA- |
| | | CCTACACTCGACATCGGTAGCTA- |
| | | TTTTTTTTcagccaactccaaTTTTTTTT- |
| | | TAGCTACCGATGTCGAGTGTAGG |
| COL2A1 | 93 | g-CGCCAGCCTCGAAA-GTTTTAGAGCTA- |
| | | CCGTCGTTGTACCGTCTACTTGAC- |
| | | TTTTTTTTcagccaactccaaTTTTTTTT- |
| | | GTCAAGTAGACGGTACAACGACGG |
| COL2A1 | 94 | -GAACCGCCCGCCCC-GTTTTAGAGCTA- |
| | | CCGTCGTTGTACCGTCTACTTGAC- |
| | | TTTTTTTTcagccaactccaaTTTTTTTT- |
| | | GTCAAGTAGACGGTACAACGACGG |
| COL2A1 | 95 | g-CGGCGCACTAGGGG-GTTTTAGAGCTA- |
| | | CCGTCGTTGTACCGTCTACTTGAC- |
| | | TTTTTTTTcagccaactccaaTTTTTTTT- |
| | | GTCAAGTAGACGGTACAACGACGG |
| COL2A1 | 96 | -GCCCCGGGTTTGGG-GTTTTAGAGCTA- |
| | | CCGTCGTTGTACCGTCTACTTGAC- |
| | | TTTTTTTTcagccaactccaaTTTTTTTT- |
| | | GTCAAGTAGACGGTACAACGACGG |
| COL2A1 | 97 | g-CGCCAGCCTCGAAA-GTTTTAGAGCTA- |
| | | CCTTCCCGACTTCCGTAGGAGCGC- |
| | | TTTTTTTTcagccaactccaaTTTTTTTT- |
| | | GCGCTCCTACGGAAGTCGGGAAGG |
| COL2A1 | 98 | -GAACCGCCCGCCCC-GTTTTAGAGCTA- |
| | | CCTTCCCGACTTCCGTAGGAGCGC- |
| | | TTTTTTTTcagccaactccaaTTTTTTTT- |
| | | GCGCTCCTACGGAAGTCGGGAAGG |
| COL2A1 | 99 | g-CGGCGCACTAGGGG-GTTTTAGAGCTA- |
| | | CCTTCCCGACTTCCGTAGGAGCGC- |
| | | TTTTTTTTcagccaactccaaTTTTTTTT- |
| | | GCGCTCCTACGGAAGTCGGGAAGG |
| COL2A1 | 100 | -GCCCCGGGTTTGGG-GTTTTAGAGCTA- |
| | | CCTTCCCGACTTCCGTAGGAGCGC- |
| | | TTTTTTTTcagccaactccaaTTTTTTTT- |
| | | GCGCTCCTACGGAAGTCGGGAAGG |
| COL2A1 | 101 | g-CGCCAGCCTCGAAA-GTTTTAGAGCTA- |
| | | CCTGAAGGTAAAGATCGGGTCCTC- |
| | | TTTTTTTTcagccaactccaaTTTTTTTT- |
| | | GAGGACCCGATCTTTACCTTCAGG |
| COL2A1 | 102 | -GAACCGCCCGCCCC-GTTTTAGAGCTA- |
| | | CCTGAAGGTAAAGATCGGGTCCTC- |
| | | TTTTTTTTcagccaactccaaTTTTTTTT- |
| | | GAGGACCCGATCTTTACCTTCAGG |
| COL2A1 | 103 | g-CGGCGCACTAGGGG-GTTTTAGAGCTA- |
| | | CCTGAAGGTAAAGATCGGGTCCTC- |
| | | TTTTTTTTcagccaactccaaTTTTTTTT- |
| | | GAGGACCCGATCTTTACCTTCAGG |
| COL2A1 | 104 | -GCCCCGGGTTTGGG-GTTTTAGAGCTA- |
| | | CCTGAAGGTAAAGATCGGGTCCTC- |
| | | TTTTTTTTcagccaactccaaTTTTTTTT- |
| | | GAGGACCCGATCTTTACCTTCAGG |
| COL2A1 | 105 | g-CGCCAGCCTCGAAA-GTTTTAGAGCTA- |
| | | CCTGGTTATAGCGGACGCACTGT- |
| | | TTTTTTTTcagccaactccaaTTTTTTTT- |
| | | ACAGTGCGTCCGCTATAACCAGG |
| COL2A1 | 106 | -GAACCGCCCGCCCC-GTTTTAGAGCTA- |
| | | CCTGGTTATAGCGGACGCACTGT- |
| | | TTTTTTTTcagccaactccaaTTTTTTTT- |
| | | ACAGTGCGTCCGCTATAACCAGG |
| COL2A1 | 107 | g-CGGCGCACTAGGGG-GTTTTAGAGCTA- |
| | | CCTGGTTATAGCGGACGCACTGT- |
| | | TTTTTTTTcagccaactccaaTTTTTTTT- |
| | | ACAGTGCGTCCGCTATAACCAGG |
| COL2A1 | 108 | -GCCCCGGGTTTGGG-GTTTTAGAGCTA- |
| | | CCTGGTTATAGCGGACGCACTGT- |
| | | TTTTTTTTcagccaactccaaTTTTTTTT- |
| | | ACAGTGCGTCCGCTATAACCAGG |
| COL2A1 | 109 | g-CGCCAGCCTCGAAA-GTTTTAGAGCTA- |
| | | CCGCATCGTATTATCTGCGAAGC- |
| | | TTTTTTTTcagccaactccaaTTTTTTTT- |
| | | GCTTCGCAGATAATACGATGCGG |
| COL2A1 | 110 | -GAACCGCCCGCCCC-GTTTTAGAGCTA- |
| | | CCGCATCGTATTATCTGCGAAGC- |
| | | TTTTTTTTcagccaactccaaTTTTTTTT- |
| | | GCTTCGCAGATAATACGATGCGG |
| COL2A1 | 111 | g-CGGCGCACTAGGGG-GTTTTAGAGCTA- |
| | | CCGCATCGTATTATCTGCGAAGC- |
| | | TTTTTTTTcagccaactccaaTTTTTTTT- |
| | | GCTTCGCAGATAATACGATGCGG |
| COL2A1 | 112 | -GCCCCGGGTTTGGG-GTTTTAGAGCTA- |
| | | CCGCATCGTATTATCTGCGAAGC- |
| | | TTTTTTTTcagccaactccaaTTTTTTTT- |
| | | GCTTCGCAGATAATACGATGCGG |
| COL2A1 | 113 | g-CGCCAGCCTCGAAA-GTTTTAGAGCTA- |
| | | CCGCTAGGACGTTCAACGGAGTC- |
| | | TTTTTTTTcagccaactccaaTTTTTTTT- |
| | | GACTCCGTTGAACGTCCTAGCGG |
| COL2A1 | 114 | -GAACCGCCCGCCCC-GTTTTAGAGCTA- |
| | | CCGCTAGGACGTTCAACGGAGTC- |
| | | TTTTTTTTcagccaactccaaTTTTTTTT- |
| | | GACTCCGTTGAACGTCCTAGCGG |
| COL2A1 | 115 | g-CGGCGCACTAGGGG-GTTTTAGAGCTA- |
| | | CCGCTAGGACGTTCAACGGAGTC- |
| | | TTTTTTTTcagccaactccaaTTTTTTTT- |
| | | GACTCCGTTGAACGTCCTAGCGG |
| COL2A1 | 116 | -GCCCCGGGTTTGGG-GTTTTAGAGCTA- |
| | | CCGCTAGGACGTTCAACGGAGTC- |
| | | TTTTTTTTcagccaactccaaTTTTTTTT- |
| | | GACTCCGTTGAACGTCCTAGCGG |
| COL2A1 | 117 | g-CGCCAGCCTCGAAA-GTTTTAGAGCTA- |
| | | CCATAGCGGTACTATCGGCATCT- |
| | | TTTTTTTTcagccaactccaaTTTTTTTT- |
| | | AGATGCCGATAGTACCGCTATGG |
| COL2A1 | 118 | -GAACCGCCCGCCCC-GTTTTAGAGCTA- |
| | | CCATAGCGGTACTATCGGCATCT- |
| | | TTTTTTTTcagccaactccaaTTTTTTTT- |
| | | AGATGCCGATAGTACCGCTATGG |
| COL2A1 | 119 | g-CGGCGCACTAGGGG-GTTTTAGAGCTA- |
| | | CCATAGCGGTACTATCGGCATCT- |
| | | TTTTTTTTcagccaactccaaTTTTTTTT- |
| | | AGATGCCGATAGTACCGCTATGG |
| COL2A1 | 120 | -GCCCCGGGTTTGGG-GTTTTAGAGCTA- |
| | | CCATAGCGGTACTATCGGCATCT- |
| | | TTTTTTTTcagccaactccaaTTTTTTTT- |
| | | AGATGCCGATAGTACCGCTATGG |
| COL2A1 | 121 | g-CGCCAGCCTCGAAA-GTTTTAGAGCTA- |
| | | CCTCGTACTAGTCTCGCATGACC- |
| | | TTTTTTTTcagccaactccaaTTTTTTTT- |
| | | GGTCATGCGAGACTAGTACGAGG |
| COL2A1 | 122 | -GAACCGCCCGCCCC-GTTTTAGAGCTA- |
| | | CCTCGTACTAGTCTCGCATGACC- |
| | | TTTTTTTTcagccaactccaaTTTTTTTT- |
| | | GGTCATGCGAGACTAGTACGAGG |
| COL2A1 | 123 | g-CGGCGCACTAGGGG-GTTTTAGAGCTA- |
| | | CCTCGTACTAGTCTCGCATGACC- |
| | | TTTTTTTTcagccaactccaaTTTTTTTT- |
| | | GGTCATGCGAGACTAGTACGAGG |
| COL2A1 | 124 | -GCCCCGGGTTTGGG-GTTTTAGAGCTA- |
| | | CCTCGTACTAGTCTCGCATGACC- |
| | | TTTTTTTTcagccaactccaaTTTTTTTT- |
| | | GGTCATGCGAGACTAGTACGAGG |
| COL2A1 | 125 | g-CGCCAGCCTCGAAA-GTTTTAGAGCTA- |
| | | CCGATAGTGCTAAACGACGCTTT- |
| | | TTTTTTTTcagccaactccaaTTTTTTTT- |
| | | AAAGCGTCGTTTAGCACTATCGG |
| COL2A1 | 126 | -GAACCGCCCGCCCC-GTTTTAGAGCTA- |
| | | CCGATAGTGCTAAACGACGCTTT- |
| | | TTTTTTTTcagccaactccaaTTTTTTTT- |
| | | AAAGCGTCGTTTAGCACTATCGG |
| COL2A1 | 127 | g-CGGCGCACTAGGGG-GTTTTAGAGCTA- |
| | | CCGATAGTGCTAAACGACGCTTT- |
| | | TTTTTTTTcagccaactccaaTTTTTTTT- |
| | | AAAGCGTCGTTTAGCACTATCGG |
| COL2A1 | 128 | -GCCCCGGGTTTGGG-GTTTTAGAGCTA- |
| | | CCGATAGTGCTAAACGACGCTTT- |
| | | TTTTTTTTcagccaactccaaTTTTTTTT- |
| | | AAAGCGTCGTTTAGCACTATCGG |
| COL2A1 | 129 | g-CGCCAGCCTCGAAA-GTTTTAGAGCTA- |
| | | CCCGTTATCGACGTTCAAGGAAC- |
| | | TTTTTTTTcagccaactccaaTTTTTTTT- |
| | | GTTCCTTGAACGTCGATAACGGG |
| COL2A1 | 130 | -GAACCGCCCGCCCC-GTTTTAGAGCTA- |
| | | CCCGTTATCGACGTTCAAGGAAC- |
| | | TTTTTTTTcagccaactccaaTTTTTTTT- |
| | | GTTCCTTGAACGTCGATAACGGG |
| COL2A1 | 131 | g-CGGCGCACTAGGGG-GTTTTAGAGCTA- |
| | | CCCGTTATCGACGTTCAAGGAAC- |
| | | TTTTTTTTcagccaactccaaTTTTTTTT- |
| | | GTTCCTTGAACGTCGATAACGGG |
| COL2A1 | 132 | -GCCCCGGGTTTGGG-GTTTTAGAGCTA- |
| | | CCCGTTATCGACGTTCAAGGAAC- |
| | | TTTTTTTTcagccaactccaaTTTTTTTT- |
| | | GTTCCTTGAACGTCGATAACGGG |
| COL2A1 | 133 | g-CGCCAGCCTCGAAA-GTTTTAGAGCTA- |
| | | CCGATCAATGCGGTCTGCGTAAC- |
| | | TTTTTTTTcagccaactccaaTTTTTTTT- |
| | | GTTACGCAGACCGCATTGATCGG |
| COL2A1 | 134 | -GAACCGCCCGCCCC-GTTTTAGAGCTA- |
| | | CCGATCAATGCGGTCTGCGTAAC- |
| | | TTTTTTTTcagccaactccaaTTTTTTTT- |
| | | GTTACGCAGACCGCATTGATCGG |
| COL2A1 | 135 | g-CGGCGCACTAGGGG-GTTTTAGAGCTA- |
| | | CCGATCAATGCGGTCTGCGTAAC- |
| | | TTTTTTTTcagccaactccaaTTTTTTTT- |
| | | GTTACGCAGACCGCATTGATCGG |
| COL2A1 | 136 | -GCCCCGGGTTTGGG-GTTTTAGAGCTA- |
| | | CCGATCAATGCGGTCTGCGTAAC- |
| | | TTTTTTTTcagccaactccaaTTTTTTTT- |
| | | GTTACGCAGACCGCATTGATCGG |
| COL2A1 | 137 | g-CGCCAGCCTCGAAA-GTTTTAGAGCTA- |
| | | CCCTTACTCGCGATACTCTCGAC- |
| | | TTTTTTTTcagccaactccaaTTTTTTTT- |
| | | GTCGAGAGTATCGCGAGTAAGGG |
| COL2A1 | 138 | -GAACCGCCCGCCCC-GTTTTAGAGCTA- |
| | | CCCTTACTCGCGATACTCTCGAC- |
| | | TTTTTTTTcagccaactccaaTTTTTTTT- |
| | | GTCGAGAGTATCGCGAGTAAGGG |
| COL2A1 | 139 | g-CGGCGCACTAGGGG-GTTTTAGAGCTA- |
| | | CCCTTACTCGCGATACTCTCGAC- |
| | | TTTTTTTTcagccaactccaaTTTTTTTT- |
| | | GTCGAGAGTATCGCGAGTAAGGG |
| COL2A1 | 140 | -GCCCCGGGTTTGGG-GTTTTAGAGCTA- |
| | | CCCTTACTCGCGATACTCTCGAC- |
| | | TTTTTTTTcagccaactccaaTTTTTTTT- |
| | | GTCGAGAGTATCGCGAGTAAGGG |
| COL2A1 | 141 | g-CGCCAGCCTCGAAA-GTTTTAGAGCTA- |
| | | CCGCGGACGGTAAGCACGGAATA- |
| | | TTTTTTTTcagccaactccaaTTTTTTTT- |
| | | TATTCCGTGCTTACCGTCCGCGG |
| COL2A1 | 142 | -GAACCGCCCGCCCC-GTTTTAGAGCTA- |
| | | CCGCGGACGGTAAGCACGGAATA- |
| | | TTTTTTTTcagccaactccaaTTTTTTTT- |
| | | TATTCCGTGCTTACCGTCCGCGG |
| COL2A1 | 143 | g-CGGCGCACTAGGGG-GTTTTAGAGCTA- |
| | | CCGCGGACGGTAAGCACGGAATA- |
| | | TTTTTTTTcagccaactccaaTTTTTTTT- |
| | | TATTCCGTGCTTACCGTCCGCGG |
| COL2A1 | 144 | -GCCCCGGGTTTGGG-GTTTTAGAGCTA- |
| | | CCGCGGACGGTAAGCACGGAATA- |
| | | TTTTTTTTcagccaactccaaTTTTTTTT- |
| | | TATTCCGTGCTTACCGTCCGCGG |
| COL2A1 | 145 | g-CGCCAGCCTCGAAA-GTTTTAGAGCTA- |
| | | CCTATAGTCACGAATCGTAGGGT- |
| | | TTTTTTTTcagccaactccaaTTTTTTTT- |
| | | ACCCTACGATTCGTGACTATAGG |
| COL2A1 | 146 | -GAACCGCCCGCCCC-GTTTTAGAGCTA- |
| | | CCTATAGTCACGAATCGTAGGGT- |
| | | TTTTTTTTcagccaactccaaTTTTTTTT- |
| | | ACCCTACGATTCGTGACTATAGG |
| COL2A1 | 147 | g-CGGCGCACTAGGGG-GTTTTAGAGCTA- |
| | | CCTATAGTCACGAATCGTAGGGT- |
| | | TTTTTTTTcagccaactccaaTTTTTTTT- |
| | | ACCCTACGATTCGTGACTATAGG |
| COL2A1 | 148 | -GCCCCGGGTTTGGG-GTTTTAGAGCTA- |
| | | CCTATAGTCACGAATCGTAGGGT- |
| | | TTTTTTTTcagccaactccaaTTTTTTTT- |
| | | ACCCTACGATTCGTGACTATAGG |
| COL2A1 | 149 | g-CGCCAGCCTCGAAA-GTTTTAGAGCTA- |
| | | CCCGTCGTCACGTATGCGTAGCA- |
| | | TTTTTTTTcagccaactccaaTTTTTTTT- |
| | | TGCTACGCATACGTGACGACGGG |
| COL2A1 | 150 | -GAACCGCCCGCCCC-GTTTTAGAGCTA- |
| | | CCCGTCGTCACGTATGCGTAGCA- |
| | | TTTTTTTTcagccaactccaaTTTTTTTT- |
| | | TGCTACGCATACGTGACGACGGG |
| COL2A1 | 151 | g-CGGCGCACTAGGGG-GTTTTAGAGCTA- |
| | | CCCGTCGTCACGTATGCGTAGCA- |
| | | TTTTTTTTcagccaactccaaTTTTTTTT- |
| | | TGCTACGCATACGTGACGACGGG |
| COL2A1 | 152 | -GCCCCGGGTTTGGG-GTTTTAGAGCTA- |
| | | CCCGTCGTCACGTATGCGTAGCA- |
| | | TTTTTTTTcagccaactccaaTTTTTTTT- |
| | | TGCTACGCATACGTGACGACGGG |
| COL2A1 | 153 | g-CGCCAGCCTCGAAA-GTTTTAGAGCTA- |
| | | CCCGAGAGGTAGTAGACGACGCA- |
| | | TTTTTTTTcagccaactccaaTTTTTTTT- |
| | | TGCGTCGTCTACTACCTCTCGGG |
| COL2A1 | 154 | -GAACCGCCCGCCCC-GTTTTAGAGCTA- |
| | | CCCGAGAGGTAGTAGACGACGCA- |
| | | TTTTTTTTcagccaactccaaTTTTTTTT- |
| | | TGCGTCGTCTACTACCTCTCGGG |
| COL2A1 | 155 | g-CGGCGCACTAGGGG-GTTTTAGAGCTA- |
| | | CCCGAGAGGTAGTAGACGACGCA- |
| | | TTTTTTTTcagccaactccaaTTTTTTTT- |
| | | TGCGTCGTCTACTACCTCTCGGG |
| COL2A1 | 156 | -GCCCCGGGTTTGGG-GTTTTAGAGCTA- |
| | | CCCGAGAGGTAGTAGACGACGCA- |
| | | TTTTTTTTcagccaactccaaTTTTTTTT- |
| | | TGCGTCGTCTACTACCTCTCGGG |
| COL2A1 | 157 | g-CGCCAGCCTCGAAA-GTTTTAGAGCTA- |
| | | CCGACGTCTACGGACGGGAGCTA- |
| | | TTTTTTTTcagccaactccaaTTTTTTTT- |
| | | TAGCTCCCGTCCGTAGACGTCGG |
| COL2A1 | 158 | -GAACCGCCCGCCCC-GTTTTAGAGCTA- |
| | | CCGACGTCTACGGACGGGAGCTA- |
| | | TTTTTTTTcagccaactccaaTTTTTTTT- |
| | | TAGCTCCCGTCCGTAGACGTCGG |
| COL2A1 | 159 | g-CGGCGCACTAGGGG-GTTTTAGAGCTA- |
| | | CCGACGTCTACGGACGGGAGCTA- |
| | | TTTTTTTTcagccaactccaaTTTTTTTT- |
| | | TAGCTCCCGTCCGTAGACGTCGG |
| COL2A1 | 160 | -GCCCCGGGTTTGGG-GTTTTAGAGCTA- |
| | | CCGACGTCTACGGACGGGAGCTA- |
| | | TTTTTTTTcagccaactccaaTTTTTTTT- |
| | | TAGCTCCCGTCCGTAGACGTCGG |
| COL2A1 | 161 | g-CGCCAGCCTCGAAA-GTTTTAGAGCTA- |
| | | CCAAAGCTCATTCGCGACTGAGC- |
| | | TTTTTTTTcagccaactccaaTTTTTTTT- |
| | | GCTCAGTCGCGAATGAGCTTTGG |
| COL2A1 | 162 | -GAACCGCCCGCCCC-GTTTTAGAGCTA- |
| | | CCAAAGCTCATTCGCGACTGAGC- |
| | | TTTTTTTTcagccaactccaaTTTTTTTT- |
| | | GCTCAGTCGCGAATGAGCTTTGG |
| COL2A1 | 163 | g-CGGCGCACTAGGGG-GTTTTAGAGCTA- |
| | | CCAAAGCTCATTCGCGACTGAGC- |
| | | TTTTTTTTcagccaactccaaTTTTTTTT- |
| | | GCTCAGTCGCGAATGAGCTTTGG |
| COL2A1 | 164 | -GCCCCGGGTTTGGG-GTTTTAGAGCTA- |
| | | CCAAAGCTCATTCGCGACTGAGC- |
| | | TTTTTTTTcagccaactccaaTTTTTTTT- |
| | | GCTCAGTCGCGAATGAGCTTTGG |
| COL2A1 | 165 | g-CGCCAGCCTCGAAA-GTTTTAGAGCTA- |
| | | CCATGGCACGATCGACACGGAGG- |
| | | TTTTTTTTcagccaactccaaTTTTTTTT- |
| | | CCTCCGTGTCGATCGTGCCATGG |
| COL2A1 | 166 | -GAACCGCCCGCCCC-GTTTTAGAGCTA- |
| | | CCATGGCACGATCGACACGGAGG- |
| | | TTTTTTTTcagccaactccaaTTTTTTTT- |
| | | CCTCCGTGTCGATCGTGCCATGG |
| COL2A1 | 167 | g-CGGCGCACTAGGGG-GTTTTAGAGCTA- |
| | | CCATGGCACGATCGACACGGAGG- |
| | | TTTTTTTTcagccaactccaaTTTTTTTT- |
| | | CCTCCGTGTCGATCGTGCCATGG |
| COL2A1 | 168 | -GCCCCGGGTTTGGG-GTTTTAGAGCTA- |
| | | CCATGGCACGATCGACACGGAGG- |
| | | TTTTTTTTcagccaactccaaTTTTTTTT- |
| | | CCTCCGTGTCGATCGTGCCATGG |
| COL2A1 | 169 | g-CGCCAGCCTCGAAA-GTTTTAGAGCTA- |
| | | CCCGAACTCTCTATCGAACGAGT- |
| | | TTTTTTTTcagccaactccaaTTTTTTTT- |
| | | ACTCGTTCGATAGAGAGTTCGGG |
| COL2A1 | 170 | -GAACCGCCCGCCCC-GTTTTAGAGCTA- |
| | | CCCGAACTCTCTATCGAACGAGT- |
| | | TTTTTTTTcagccaactccaaTTTTTTTT- |
| | | ACTCGTTCGATAGAGAGTTCGGG |
| COL2A1 | 171 | g-CGGCGCACTAGGGG-GTTTTAGAGCTA- |
| | | CCCGAACTCTCTATCGAACGAGT- |
| | | TTTTTTTTcagccaactccaaTTTTTTTT- |
| | | ACTCGTTCGATAGAGAGTTCGGG |
| COL2A1 | 172 | -GCCCCGGGTTTGGG-GTTTTAGAGCTA- |
| | | CCCGAACTCTCTATCGAACGAGT- |
| | | TTTTTTTTcagccaactccaaTTTTTTTT- |
| | | ACTCGTTCGATAGAGAGTTCGGG |
| COL2A1 | 173 | g-CGCCAGCCTCGAAA-GTTTTAGAGCTA- |
| | | CCTACACGATAGTGGTCGTGCGC- |
| | | TTTTTTTTcagccaactccaaTTTTTTTT- |
| | | GCGCACGACCACTATCGTGTAGG |
| COL2A1 | 174 | -GAACCGCCCGCCCC-GTTTTAGAGCTA- |
| | | CCTACACGATAGTGGTCGTGCGC- |
| | | TTTTTTTTcagccaactccaaTTTTTTTT- |
| | | GCGCACGACCACTATCGTGTAGG |
| COL2A1 | 175 | g-CGGCGCACTAGGGG-GTTTTAGAGCTA- |
| | | CCTACACGATAGTGGTCGTGCGC- |
| | | TTTTTTTTcagccaactccaaTTTTTTTT- |
| | | GCGCACGACCACTATCGTGTAGG |
| COL2A1 | 176 | -GCCCCGGGTTTGGG-GTTTTAGAGCTA- |
| | | CCTACACGATAGTGGTCGTGCGC- |
| | | TTTTTTTTcagccaactccaaTTTTTTTT- |
| | | GCGCACGACCACTATCGTGTAGG |
| COL2A1 | 177 | g-CGCCAGCCTCGAAA-GTTTTAGAGCTA- |
| | | CCCTGGCGGAACGTTCGAGTAAT- |
| | | TTTTTTTTcagccaactccaaTTTTTTTT- |
| | | ATTACTCGAACGTTCCGCCAGGG |
| COL2A1 | 178 | -GAACCGCCCGCCCC-GTTTTAGAGCTA- |
| | | CCCTGGCGGAACGTTCGAGTAAT- |
| | | TTTTTTTTcagccaactccaaTTTTTTTT- |
| | | ATTACTCGAACGTTCCGCCAGGG |
| COL2A1 | 179 | g-CGGCGCACTAGGGG-GTTTTAGAGCTA- |
| | | CCCTGGCGGAACGTTCGAGTAAT- |
| | | TTTTTTTTcagccaactccaaTTTTTTTT- |
| | | ATTACTCGAACGTTCCGCCAGGG |
| COL2A1 | 180 | -GCCCCGGGTTTGGG-GTTTTAGAGCTA- |
| | | CCCTGGCGGAACGTTCGAGTAAT- |
| | | TTTTTTTTcagccaactccaaTTTTTTTT- |
| | | ATTACTCGAACGTTCCGCCAGGG |
| COL2A1 | 181 | g-CGCCAGCCTCGAAA-GTTTTAGAGCTA- |
| | | CCTACACTCGACATCGGTAGCTA- |
| | | TTTTTTTTcagccaactccaaTTTTTTTT- |
| | | TAGCTACCGATGTCGAGTGTAGG |
| COL2A1 | 182 | -GAACCGCCCGCCCC-GTTTTAGAGCTA- |
| | | CCTACACTCGACATCGGTAGCTA- |
| | | TTTTTTTTcagccaactccaaTTTTTTTT- |
| | | TAGCTACCGATGTCGAGTGTAGG |
| COL2A1 | 183 | g-CGGCGCACTAGGGG-GTTTTAGAGCTA- |
| | | CCTACACTCGACATCGGTAGCTA- |
| | | TTTTTTTTcagccaactccaaTTTTTTTT- |
| | | TAGCTACCGATGTCGAGTGTAGG |
| COL2A1 | 184 | -GCCCCGGGTTTGGG-GTTTTAGAGCTA- |
| | | CCTACACTCGACATCGGTAGCTA- |
| | | TTTTTTTTcagccaactccaaTTTTTTTT- |
| | | TAGCTACCGATGTCGAGTGTAGG |
| MEF2D | 185 | g-CCGCAGCCTAGCTT-GTTTTAGAGCTA- |
| | | CCGTCGTTGTACCGTCTACTTGAC- |
| | | TTTTTTTTcagccaactccaaTTTTTTTT- |
| | | GTCAAGTAGACGGTACAACGACGG |
| MEF2D | 186 | g-TGACGGACAGGCGT-GTTTTAGAGCTA- |
| | | CCGTCGTTGTACCGTCTACTTGAC- |
| | | TTTTTTTTcagccaactccaaTTTTTTTT- |
| | | GTCAAGTAGACGGTACAACGACGG |
| MEF2D | 187 | g-CGGGGCCGCGTCCT-GTTTTAGAGCTA- |
| | | CCGTCGTTGTACCGTCTACTTGAC- |
| | | TTTTTTTTcagccaactccaaTTTTTTTT- |
| | | GTCAAGTAGACGGTACAACGACGG |
| MEF2D | 188 | g-CAGAGGCCTTTAAA-GTTTTAGAGCTA- |
| | | CCGTCGTTGTACCGTCTACTTGAC- |
| | | TTTTTTTTcagccaactccaaTTTTTTTT- |
| | | GTCAAGTAGACGGTACAACGACGG |
| MEF2D | 189 | g-CCGCAGCCTAGCTT-GTTTTAGAGCTA- |
| | | CCTTCCCGACTTCCGTAGGAGCGC- |
| | | TTTTTTTTcagccaactccaaTTTTTTTT- |
| | | GCGCTCCTACGGAAGTCGGGAAGG |
| MEF2D | 190 | g-TGACGGACAGGCGT-GTTTTAGAGCTA- |
| | | CCTTCCCGACTTCCGTAGGAGCGC- |
| | | TTTTTTTTcagccaactccaaTTTTTTTT- |
| | | GCGCTCCTACGGAAGTCGGGAAGG |
| MEF2D | 191 | g-CGGGGCCGCGTCCT-GTTTTAGAGCTA- |
| | | CCTTCCCGACTTCCGTAGGAGCGC- |
| | | TTTTTTTTcagccaactccaaTTTTTTTT- |
| | | GCGCTCCTACGGAAGTCGGGAAGG |
| MEF2D | 192 | g-CAGAGGCCTTTAAA-GTTTTAGAGCTA- |
| | | CCTTCCCGACTTCCGTAGGAGCGC- |
| | | TTTTTTTTcagccaactccaaTTTTTTTT- |
| | | GCGCTCCTACGGAAGTCGGGAAGG |
| MEF2D | 193 | g-CCGCAGCCTAGCTT-GTTTTAGAGCTA- |
| | | CCTGAAGGTAAAGATCGGGTCCTC- |
| | | TTTTTTTTcagccaactccaaTTTTTTTT- |
| | | GAGGACCCGATCTTTACCTTCAGG |
| MEF2D | 194 | g-TGACGGACAGGCGT-GTTTTAGAGCTA- |
| | | CCTGAAGGTAAAGATCGGGTCCTC- |
| | | TTTTTTTTcagccaactccaaTTTTTTTT- |
| | | GAGGACCCGATCTTTACCTTCAGG |
| MEF2D | 195 | g-CGGGGCCGCGTCCT-GTTTTAGAGCTA- |
| | | CCTGAAGGTAAAGATCGGGTCCTC- |
| | | TTTTTTTTcagccaactccaaTTTTTTTT- |
| | | GAGGACCCGATCTTTACCTTCAGG |
| MEF2D | 196 | g-CAGAGGCCTTTAAA-GTTTTAGAGCTA- |
| | | CCTGAAGGTAAAGATCGGGTCCTC- |
| | | TTTTTTTTcagccaactccaaTTTTTTTT- |
| | | GAGGACCCGATCTTTACCTTCAGG |
| MEF2D | 197 | g-CCGCAGCCTAGCTT-GTTTTAGAGCTA- |
| | | CCTGGTTATAGCGGACGCACTGT- |
| | | TTTTTTTTcagccaactccaaTTTTTTTT- |
| | | ACAGTGCGTCCGCTATAACCAGG |
| MEF2D | 198 | g-TGACGGACAGGCGT-GTTTTAGAGCTA- |
| | | CCTGGTTATAGCGGACGCACTGT- |
| | | TTTTTTTTcagccaactccaaTTTTTTTT- |
| | | ACAGTGCGTCCGCTATAACCAGG |
| MEF2D | 199 | g-CGGGGCCGCGTCCT-GTTTTAGAGCTA- |
| | | CCTGGTTATAGCGGACGCACTGT- |
| | | TTTTTTTTcagccaactccaaTTTTTTTT- |
| | | ACAGTGCGTCCGCTATAACCAGG |
| MEF2D | 200 | g-CAGAGGCCTTTAAA-GTTTTAGAGCTA- |
| | | CCTGGTTATAGCGGACGCACTGT- |
| | | TTTTTTTTcagccaactccaaTTTTTTTT- |
| | | ACAGTGCGTCCGCTATAACCAGG |
| MEF2D | 201 | g-CCGCAGCCTAGCTT-GTTTTAGAGCTA- |
| | | CCGCATCGTATTATCTGCGAAGC- |
| | | TTTTTTTTcagccaactccaaTTTTTTTT- |
| | | GCTTCGCAGATAATACGATGCGG |
| MEF2D | 202 | g-TGACGGACAGGCGT-GTTTTAGAGCTA- |
| | | CCGCATCGTATTATCTGCGAAGC- |
| | | TTTTTTTTcagccaactccaaTTTTTTTT- |
| | | GCTTCGCAGATAATACGATGCGG |
| MEF2D | 203 | g-CGGGGCCGCGTCCT-GTTTTAGAGCTA- |
| | | CCGCATCGTATTATCTGCGAAGC- |
| | | TTTTTTTTcagccaactccaaTTTTTTTT- |
| | | GCTTCGCAGATAATACGATGCGG |
| MEF2D | 204 | g-CAGAGGCCTTTAAA-GTTTTAGAGCTA- |
| | | CCGCATCGTATTATCTGCGAAGC- |
| | | TTTTTTTTcagccaactccaaTTTTTTTT- |
| | | GCTTCGCAGATAATACGATGCGG |
| MEF2D | 205 | g-CCGCAGCCTAGCTT-GTTTTAGAGCTA- |
| | | CCGCTAGGACGTTCAACGGAGTC- |
| | | TTTTTTTTcagccaactccaaTTTTTTTT- |
| | | GACTCCGTTGAACGTCCTAGCGG |
| MEF2D | 206 | g-TGACGGACAGGCGT-GTTTTAGAGCTA- |
| | | CCGCTAGGACGTTCAACGGAGTC- |
| | | TTTTTTTTcagccaactccaaTTTTTTTT- |
| | | GACTCCGTTGAACGTCCTAGCGG |
| MEF2D | 207 | g-CGGGGCCGCGTCCT-GTTTTAGAGCTA- |
| | | CCGCTAGGACGTTCAACGGAGTC- |
| | | TTTTTTTTcagccaactccaaTTTTTTTT- |
| | | GACTCCGTTGAACGTCCTAGCGG |
| MEF2D | 208 | g-CAGAGGCCTTTAAA-GTTTTAGAGCTA- |
| | | CCGCTAGGACGTTCAACGGAGTC- |
| | | TTTTTTTTcagccaactccaaTTTTTTTT- |
| | | GACTCCGTTGAACGTCCTAGCGG |
| MEF2D | 209 | g-CCGCAGCCTAGCTT-GTTTTAGAGCTA- |
| | | CCATAGCGGTACTATCGGCATCT- |
| | | TTTTTTTTcagccaactccaaTTTTTTTT- |
| | | AGATGCCGATAGTACCGCTATGG |
| MEF2D | 210 | g-TGACGGACAGGCGT-GTTTTAGAGCTA- |
| | | CCATAGCGGTACTATCGGCATCT- |
| | | TTTTTTTTcagccaactccaaTTTTTTTT- |
| | | AGATGCCGATAGTACCGCTATGG |
| MEF2D | 211 | g-CGGGGCCGCGTCCT-GTTTTAGAGCTA- |
| | | CCATAGCGGTACTATCGGCATCT- |
| | | TTTTTTTTcagccaactccaaTTTTTTTT- |
| | | AGATGCCGATAGTACCGCTATGG |
| MEF2D | 212 | g-CAGAGGCCTTTAAA-GTTTTAGAGCTA- |
| | | CCATAGCGGTACTATCGGCATCT- |
| | | TTTTTTTTcagccaactccaaTTTTTTTT- |
| | | AGATGCCGATAGTACCGCTATGG |
| MEF2D | 213 | g-CCGCAGCCTAGCTT-GTTTTAGAGCTA- |
| | | CCTCGTACTAGTCTCGCATGACC- |
| | | TTTTTTTTcagccaactccaaTTTTTTTT- |
| | | GGTCATGCGAGACTAGTACGAGG |
| MEF2D | 214 | g-TGACGGACAGGCGT-GTTTTAGAGCTA- |
| | | CCTCGTACTAGTCTCGCATGACC- |
| | | TTTTTTTTcagccaactccaaTTTTTTTT- |
| | | GGTCATGCGAGACTAGTACGAGG |
| MEF2D | 215 | g-CGGGGCCGCGTCCT-GTTTTAGAGCTA- |
| | | CCTCGTACTAGTCTCGCATGACC- |
| | | TTTTTTTTcagccaactccaaTTTTTTTT- |
| | | GGTCATGCGAGACTAGTACGAGG |
| MEF2D | 216 | g-CAGAGGCCTTTAAA-GTTTTAGAGCTA- |
| | | CCTCGTACTAGTCTCGCATGACC- |
| | | TTTTTTTTcagccaactccaaTTTTTTTT- |
| | | GGTCATGCGAGACTAGTACGAGG |
| MEF2D | 217 | g-CCGCAGCCTAGCTT-GTTTTAGAGCTA- |
| | | CCGATAGTGCTAAACGACGCTTT- |
| | | TTTTTTTTcagccaactccaaTTTTTTTT- |
| | | AAAGCGTCGTTTAGCACTATCGG |
| MEF2D | 218 | g-TGACGGACAGGCGT-GTTTTAGAGCTA- |
| | | CCGATAGTGCTAAACGACGCTTT- |
| | | TTTTTTTTcagccaactccaaTTTTTTTT- |
| | | AAAGCGTCGTTTAGCACTATCGG |
| MEF2D | 219 | g-CGGGGCCGCGTCCT-GTTTTAGAGCTA- |
| | | CCGATAGTGCTAAACGACGCTTT- |
| | | TTTTTTTTcagccaactccaaTTTTTTTT- |
| | | AAAGCGTCGTTTAGCACTATCGG |
| MEF2D | 220 | g-CAGAGGCCTTTAAA-GTTTTAGAGCTA- |
| | | CCGATAGTGCTAAACGACGCTTT- |
| | | TTTTTTTTcagccaactccaaTTTTTTTT- |
| | | AAAGCGTCGTTTAGCACTATCGG |
| MEF2D | 221 | g-CCGCAGCCTAGCTT-GTTTTAGAGCTA- |
| | | CCCGTTATCGACGTTCAAGGAAC- |
| | | TTTTTTTTcagccaactccaaTTTTTTTT- |
| | | GTTCCTTGAACGTCGATAACGGG |
| MEF2D | 222 | g-TGACGGACAGGCGT-GTTTTAGAGCTA- |
| | | CCCGTTATCGACGTTCAAGGAAC- |
| | | TTTTTTTTcagccaactccaaTTTTTTTT- |
| | | GTTCCTTGAACGTCGATAACGGG |
| MEF2D | 223 | g-CGGGGCCGCGTCCT-GTTTTAGAGCTA- |
| | | CCCGTTATCGACGTTCAAGGAAC- |
| | | TTTTTTTTcagccaactccaaTTTTTTTT- |
| | | GTTCCTTGAACGTCGATAACGGG |
| MEF2D | 224 | g-CAGAGGCCTTTAAA-GTTTTAGAGCTA- |
| | | CCCGTTATCGACGTTCAAGGAAC- |
| | | TTTTTTTTcagccaactccaaTTTTTTTT- |
| | | GTTCCTTGAACGTCGATAACGGG |
| MEF2D | 225 | g-CCGCAGCCTAGCTT-GTTTTAGAGCTA- |
| | | CCGATCAATGCGGTCTGCGTAAC- |
| | | TTTTTTTTcagccaactccaaTTTTTTTT- |
| | | GTTACGCAGACCGCATTGATCGG |
| MEF2D | 226 | g-TGACGGACAGGCGT-GTTTTAGAGCTA- |
| | | CCGATCAATGCGGTCTGCGTAAC- |
| | | TTTTTTTTcagccaactccaaTTTTTTTT- |
| | | GTTACGCAGACCGCATTGATCGG |
| MEF2D | 227 | g-CGGGGCCGCGTCCT-GTTTTAGAGCTA- |
| | | CCGATCAATGCGGTCTGCGTAAC- |
| | | TTTTTTTTcagccaactccaaTTTTTTTT- |
| | | GTTACGCAGACCGCATTGATCGG |
| MEF2D | 228 | g-CAGAGGCCTTTAAA-GTTTTAGAGCTA- |
| | | CCGATCAATGCGGTCTGCGTAAC- |
| | | TTTTTTTTcagccaactccaaTTTTTTTT- |
| | | GTTACGCAGACCGCATTGATCGG |
| MEF2D | 229 | g-CCGCAGCCTAGCTT-GTTTTAGAGCTA- |
| | | CCCTTACTCGCGATACTCTCGAC- |
| | | TTTTTTTTcagccaactccaaTTTTTTTT- |
| | | GTCGAGAGTATCGCGAGTAAGGG |
| MEF2D | 230 | g-TGACGGACAGGCGT-GTTTTAGAGCTA- |
| | | CCCTTACTCGCGATACTCTCGAC- |
| | | TTTTTTTTcagccaactccaaTTTTTTTT- |
| | | GTCGAGAGTATCGCGAGTAAGGG |
| MEF2D | 231 | g-CGGGGCCGCGTCCT-GTTTTAGAGCTA- |
| | | CCCTTACTCGCGATACTCTCGAC- |
| | | TTTTTTTTcagccaactccaaTTTTTTTT- |
| | | GTCGAGAGTATCGCGAGTAAGGG |
| MEF2D | 232 | g-CAGAGGCCTTTAAA-GTTTTAGAGCTA- |
| | | CCCTTACTCGCGATACTCTCGAC- |
| | | TTTTTTTTcagccaactccaaTTTTTTTT- |
| | | GTCGAGAGTATCGCGAGTAAGGG |
| MEF2D | 233 | g-CCGCAGCCTAGCTT-GTTTTAGAGCTA- |
| | | CCGCGGACGGTAAGCACGGAATA- |
| | | TTTTTTTTcagccaactccaaTTTTTTTT- |
| | | TATTCCGTGCTTACCGTCCGCGG |
| MEF2D | 234 | g-TGACGGACAGGCGT-GTTTTAGAGCTA- |
| | | CCGCGGACGGTAAGCACGGAATA- |
| | | TTTTTTTTcagccaactccaaTTTTTTTT- |
| | | TATTCCGTGCTTACCGTCCGCGG |
| MEF2D | 235 | g-CGGGGCCGCGTCCT-GTTTTAGAGCTA- |
| | | CCGCGGACGGTAAGCACGGAATA- |
| | | TTTTTTTTcagccaactccaaTTTTTTTT- |
| | | TATTCCGTGCTTACCGTCCGCGG |
| MEF2D | 236 | g-CAGAGGCCTTTAAA-GTTTTAGAGCTA- |
| | | CCGCGGACGGTAAGCACGGAATA- |
| | | TTTTTTTTcagccaactccaaTTTTTTTT- |
| | | TATTCCGTGCTTACCGTCCGCGG |
| MEF2D | 237 | g-CCGCAGCCTAGCTT-GTTTTAGAGCTA- |
| | | CCTATAGTCACGAATCGTAGGGT- |
| | | TTTTTTTTcagccaactccaaTTTTTTTT- |
| | | ACCCTACGATTCGTGACTATAGG |
| MEF2D | 238 | g-TGACGGACAGGCGT-GTTTTAGAGCTA- |
| | | CCTATAGTCACGAATCGTAGGGT- |
| | | TTTTTTTTcagccaactccaaTTTTTTTT- |
| | | ACCCTACGATTCGTGACTATAGG |
| MEF2D | 239 | g-CGGGGCCGCGTCCT-GTTTTAGAGCTA- |
| | | CCTATAGTCACGAATCGTAGGGT- |
| | | TTTTTTTTcagccaactccaaTTTTTTTT- |
| | | ACCCTACGATTCGTGACTATAGG |
| MEF2D | 240 | g-CAGAGGCCTTTAAA-GTTTTAGAGCTA- |
| | | CCTATAGTCACGAATCGTAGGGT- |
| | | TTTTTTTTcagccaactccaaTTTTTTTT- |
| | | ACCCTACGATTCGTGACTATAGG |
| MEF2D | 241 | g-CCGCAGCCTAGCTT-GTTTTAGAGCTA- |
| | | CCCGTCGTCACGTATGCGTAGCA- |
| | | TTTTTTTTcagccaactccaaTTTTTTTT- |
| | | TGCTACGCATACGTGACGACGGG |
| MEF2D | 242 | g-TGACGGACAGGCGT-GTTTTAGAGCTA- |
| | | CCCGTCGTCACGTATGCGTAGCA- |
| | | TTTTTTTTcagccaactccaaTTTTTTTT- |
| | | TGCTACGCATACGTGACGACGGG |
| MEF2D | 243 | g-CGGGGCCGCGTCCT-GTTTTAGAGCTA- |
| | | CCCGTCGTCACGTATGCGTAGCA- |
| | | TTTTTTTTcagccaactccaaTTTTTTTT- |
| | | TGCTACGCATACGTGACGACGGG |
| MEF2D | 244 | g-CAGAGGCCTTTAAA-GTTTTAGAGCTA- |
| | | CCCGTCGTCACGTATGCGTAGCA- |
| | | TTTTTTTTcagccaactccaaTTTTTTTT- |
| | | TGCTACGCATACGTGACGACGGG |
| MEF2D | 245 | g-CCGCAGCCTAGCTT-GTTTTAGAGCTA- |
| | | CCCGAGAGGTAGTAGACGACGCA- |
| | | TTTTTTTTcagccaactccaaTTTTTTTT- |
| | | TGCGTCGTCTACTACCTCTCGGG |
| MEF2D | 246 | g-TGACGGACAGGCGT-GTTTTAGAGCTA- |
| | | CCCGAGAGGTAGTAGACGACGCA- |
| | | TTTTTTTTcagccaactccaaTTTTTTTT- |
| | | TGCGTCGTCTACTACCTCTCGGG |
| MEF2D | 247 | g-CGGGGCCGCGTCCT-GTTTTAGAGCTA- |
| | | CCCGAGAGGTAGTAGACGACGCA- |
| | | TTTTTTTTcagccaactccaaTTTTTTTT- |
| | | TGCGTCGTCTACTACCTCTCGGG |
| MEF2D | 248 | g-CAGAGGCCTTTAAA-GTTTTAGAGCTA- |
| | | CCCGAGAGGTAGTAGACGACGCA- |
| | | TTTTTTTTcagccaactccaaTTTTTTTT- |
| | | TGCGTCGTCTACTACCTCTCGGG |
| MEF2D | 249 | g-CCGCAGCCTAGCTT-GTTTTAGAGCTA- |
| | | CCGACGTCTACGGACGGGAGCTA- |
| | | TTTTTTTTcagccaactccaaTTTTTTTT- |
| | | TAGCTCCCGTCCGTAGACGTCGG |
| MEF2D | 250 | g-TGACGGACAGGCGT-GTTTTAGAGCTA- |
| | | CCGACGTCTACGGACGGGAGCTA- |
| | | TTTTTTTTcagccaactccaaTTTTTTTT- |
| | | TAGCTCCCGTCCGTAGACGTCGG |
| MEF2D | 251 | g-CGGGGCCGCGTCCT-GTTTTAGAGCTA- |
| | | CCGACGTCTACGGACGGGAGCTA- |
| | | TTTTTTTTcagccaactccaaTTTTTTTT- |
| | | TAGCTCCCGTCCGTAGACGTCGG |
| MEF2D | 252 | g-CAGAGGCCTTTAAA-GTTTTAGAGCTA- |
| | | CCGACGTCTACGGACGGGAGCTA- |
| | | TTTTTTTTcagccaactccaaTTTTTTTT- |
| | | TAGCTCCCGTCCGTAGACGTCGG |
| MEF2D | 253 | g-CCGCAGCCTAGCTT-GTTTTAGAGCTA- |
| | | CCAAAGCTCATTCGCGACTGAGC- |
| | | TTTTTTTTcagccaactccaaTTTTTTTT- |
| | | GCTCAGTCGCGAATGAGCTTTGG |
| MEF2D | 254 | g-TGACGGACAGGCGT-GTTTTAGAGCTA- |
| | | CCAAAGCTCATTCGCGACTGAGC- |
| | | TTTTTTTTcagccaactccaaTTTTTTTT- |
| | | GCTCAGTCGCGAATGAGCTTTGG |
| MEF2D | 255 | g-CGGGGCCGCGTCCT-GTTTTAGAGCTA- |
| | | CCAAAGCTCATTCGCGACTGAGC- |
| | | TTTTTTTTcagccaactccaaTTTTTTTT- |
| | | GCTCAGTCGCGAATGAGCTTTGG |
| MEF2D | 256 | g-CAGAGGCCTTTAAA-GTTTTAGAGCTA- |
| | | CCAAAGCTCATTCGCGACTGAGC- |
| | | TTTTTTTTcagccaactccaaTTTTTTTT- |
| | | GCTCAGTCGCGAATGAGCTTTGG |
| MEF2D | 257 | g-CCGCAGCCTAGCTT-GTTTTAGAGCTA- |
| | | CCATGGCACGATCGACACGGAGG- |
| | | TTTTTTTTcagccaactccaaTTTTTTTT- |
| | | CCTCCGTGTCGATCGTGCCATGG |
| MEF2D | 258 | g-TGACGGACAGGCGT-GTTTTAGAGCTA- |
| | | CCATGGCACGATCGACACGGAGG- |
| | | TTTTTTTTcagccaactccaaTTTTTTTT- |
| | | CCTCCGTGTCGATCGTGCCATGG |
| MEF2D | 259 | g-CGGGGCCGCGTCCT-GTTTTAGAGCTA- |
| | | CCATGGCACGATCGACACGGAGG- |
| | | TTTTTTTTcagccaactccaaTTTTTTTT- |
| | | CCTCCGTGTCGATCGTGCCATGG |
| MEF2D | 260 | g-CAGAGGCCTTTAAA-GTTTTAGAGCTA- |
| | | CCATGGCACGATCGACACGGAGG- |
| | | TTTTTTTTcagccaactccaaTTTTTTTT- |
| | | CCTCCGTGTCGATCGTGCCATGG |
| MEF2D | 261 | g-CCGCAGCCTAGCTT-GTTTTAGAGCTA- |
| | | CCCGAACTCTCTATCGAACGAGT- |
| | | TTTTTTTTcagccaactccaaTTTTTTTT- |
| | | ACTCGTTCGATAGAGAGTTCGGG |
| MEF2D | 262 | g-TGACGGACAGGCGT-GTTTTAGAGCTA- |
| | | CCCGAACTCTCTATCGAACGAGT- |
| | | TTTTTTTTcagccaactccaaTTTTTTTT- |
| | | ACTCGTTCGATAGAGAGTTCGGG |
| MEF2D | 263 | g-CGGGGCCGCGTCCT-GTTTTAGAGCTA- |
| | | CCCGAACTCTCTATCGAACGAGT- |
| | | TTTTTTTTcagccaactccaaTTTTTTTT- |
| | | ACTCGTTCGATAGAGAGTTCGGG |
| MEF2D | 264 | g-CAGAGGCCTTTAAA-GTTTTAGAGCTA- |
| | | CCCGAACTCTCTATCGAACGAGT- |
| | | TTTTTTTTcagccaactccaaTTTTTTTT- |
| | | ACTCGTTCGATAGAGAGTTCGGG |
| MEF2D | 265 | g-CCGCAGCCTAGCTT-GTTTTAGAGCTA- |
| | | CCTACACGATAGTGGTCGTGCGC- |
| | | TTTTTTTTcagccaactccaaTTTTTTTT- |
| | | GCGCACGACCACTATCGTGTAGG |
| MEF2D | 266 | g-TGACGGACAGGCGT-GTTTTAGAGCTA- |
| | | CCTACACGATAGTGGTCGTGCGC- |
| | | TTTTTTTTcagccaactccaaTTTTTTTT- |
| | | GCGCACGACCACTATCGTGTAGG |
| MEF2D | 267 | g-CGGGGCCGCGTCCT-GTTTTAGAGCTA- |
| | | CCTACACGATAGTGGTCGTGCGC- |
| | | TTTTTTTTcagccaactccaaTTTTTTTT- |
| | | GCGCACGACCACTATCGTGTAGG |
| MEF2D | 268 | g-CAGAGGCCTTTAAA-GTTTTAGAGCTA- |
| | | CCTACACGATAGTGGTCGTGCGC- |
| | | TTTTTTTTcagccaactccaaTTTTTTTT- |
| | | GCGCACGACCACTATCGTGTAGG |
| MEF2D | 269 | g-CCGCAGCCTAGCTT-GTTTTAGAGCTA- |
| | | CCCTGGCGGAACGTTCGAGTAAT- |
| | | TTTTTTTTcagccaactccaaTTTTTTTT- |
| | | ATTACTCGAACGTTCCGCCAGGG |
| MEF2D | 270 | g-TGACGGACAGGCGT-GTTTTAGAGCTA- |
| | | CCCTGGCGGAACGTTCGAGTAAT- |
| | | TTTTTTTTcagccaactccaaTTTTTTTT- |
| | | ATTACTCGAACGTTCCGCCAGGG |
| MEF2D | 271 | g-CGGGGCCGCGTCCT-GTTTTAGAGCTA- |
| | | CCCTGGCGGAACGTTCGAGTAAT- |
| | | TTTTTTTTcagccaactccaaTTTTTTTT- |
| | | ATTACTCGAACGTTCCGCCAGGG |
| MEF2D | 272 | g-CAGAGGCCTTTAAA-GTTTTAGAGCTA- |
| | | CCCTGGCGGAACGTTCGAGTAAT- |
| | | TTTTTTTTcagccaactccaaTTTTTTTT- |
| | | ATTACTCGAACGTTCCGCCAGGG |
| MEF2D | 273 | g-CCGCAGCCTAGCTT-GTTTTAGAGCTA- |
| | | CCTACACTCGACATCGGTAGCTA- |
| | | TTTTTTTTcagccaactccaaTTTTTTTT- |
| | | TAGCTACCGATGTCGAGTGTAGG |
| MEF2D | 274 | g-TGACGGACAGGCGT-GTTTTAGAGCTA- |
| | | CCTACACTCGACATCGGTAGCTA- |
| | | TTTTTTTTcagccaactccaaTTTTTTTT- |
| | | TAGCTACCGATGTCGAGTGTAGG |
| MEF2D | 275 | g-CGGGGCCGCGTCCT-GTTTTAGAGCTA- |
| | | CCTACACTCGACATCGGTAGCTA- |
| | | TTTTTTTTcagccaactccaaTTTTTTTT- |
| | | TAGCTACCGATGTCGAGTGTAGG |
| MEF2D | 276 | g-CAGAGGCCTTTAAA-GTTTTAGAGCTA- |
| | | CCTACACTCGACATCGGTAGCTA- |
| | | TTTTTTTTcagccaactccaaTTTTTTTT- |
| | | TAGCTACCGATGTCGAGTGTAGG |
| pax9 | 277 | -GCGTGGGGTAAGGG-GTTTTAGAGCTA- |
| | | CCGTCGTTGTACCGTCTACTTGAC- |
| | | TTTTTTTTcagccaactccaaTTTTTTTT- |
| | | GTCAAGTAGACGGTACAACGACGG |
| pax9 | 278 | g-CACGGCAATTTCTC-GTTTTAGAGCTA- |
| | | CCGTCGTTGTACCGTCTACTTGAC- |
| | | TTTTTTTTcagccaactccaaTTTTTTTT- |
| | | GTCAAGTAGACGGTACAACGACGG |
| pax9 | 279 | -GTGACGCTAATATG-GTTTTAGAGCTA- |
| | | CCGTCGTTGTACCGTCTACTTGAC- |
| | | TTTTTTTTcagccaactccaaTTTTTTTT- |
| | | GTCAAGTAGACGGTACAACGACGG |
| pax9 | 280 | g-CCTAGGGGTAGGGA-GTTTTAGAGCTA- |
| | | CCGTCGTTGTACCGTCTACTTGAC- |
| | | TTTTTTTTcagccaactccaaTTTTTTTT- |
| | | GTCAAGTAGACGGTACAACGACGG |
| pax9 | 281 | g-AGGGGCGGGTCCGA-GTTTTAGAGCTA- |
| | | CCGTCGTTGTACCGTCTACTTGAC- |
| | | TTTTTTTTcagccaactccaaTTTTTTTT- |
| | | GTCAAGTAGACGGTACAACGACGG |
| pax9 | 282 | g-CTAAGCAGCAACGT-GTTTTAGAGCTA- |
| | | CCGTCGTTGTACCGTCTACTTGAC- |
| | | TTTTTTTTcagccaactccaaTTTTTTTT- |
| | | GTCAAGTAGACGGTACAACGACGG |
| pax9 | 283 | -GCTAGCTCCCCACC-GTTTTAGAGCTA- |
| | | CCGTCGTTGTACCGTCTACTTGAC- |
| | | TTTTTTTTcagccaactccaaTTTTTTTT- |
| | | GTCAAGTAGACGGTACAACGACGG |
| pax9 | 284 | g-AGCTGCATGGTGAT-GTTTTAGAGCTA- |
| | | CCGTCGTTGTACCGTCTACTTGAC- |
| | | TTTTTTTTcagccaactccaaTTTTTTTT- |
| | | GTCAAGTAGACGGTACAACGACGG |
| pax9 | 285 | -GCGTGGGGTAAGGG-GTTTTAGAGCTA- |
| | | CCTTCCCGACTTCCGTAGGAGCGC- |
| | | TTTTTTTTcagccaactccaaTTTTTTTT- |
| | | GCGCTCCTACGGAAGTCGGGAAGG |
| pax9 | 286 | g-CACGGCAATTTCTC-GTTTTAGAGCTA- |
| | | CCTTCCCGACTTCCGTAGGAGCGC- |
| | | TTTTTTTTcagccaactccaaTTTTTTTT- |
| | | GCGCTCCTACGGAAGTCGGGAAGG |
| pax9 | 287 | -GTGACGCTAATATG-GTTTTAGAGCTA- |
| | | CCTTCCCGACTTCCGTAGGAGCGC- |
| | | TTTTTTTTcagccaactccaaTTTTTTTT- |
| | | GCGCTCCTACGGAAGTCGGGAAGG |
| pax9 | 288 | g-CCTAGGGGTAGGGA-GTTTTAGAGCTA- |
| | | CCTTCCCGACTTCCGTAGGAGCGC- |
| | | TTTTTTTTcagccaactccaaTTTTTTTT- |
| | | GCGCTCCTACGGAAGTCGGGAAGG |
| pax9 | 289 | g-AGGGGCGGGTCCGA-GTTTTAGAGCTA- |
| | | CCTTCCCGACTTCCGTAGGAGCGC- |
| | | TTTTTTTTcagccaactccaaTTTTTTTT- |
| | | GCGCTCCTACGGAAGTCGGGAAGG |
| pax9 | 290 | g-CTAAGCAGCAACGT-GTTTTAGAGCTA- |
| | | CCTTCCCGACTTCCGTAGGAGCGC- |
| | | TTTTTTTTcagccaactccaaTTTTTTTT- |
| | | GCGCTCCTACGGAAGTCGGGAAGG |
| pax9 | 291 | -GCTAGCTCCCCACC-GTTTTAGAGCTA- |
| | | CCTTCCCGACTTCCGTAGGAGCGC- |
| | | TTTTTTTTcagccaactccaaTTTTTTTT- |
| | | GCGCTCCTACGGAAGTCGGGAAGG |
| pax9 | 292 | g-AGCTGCATGGTGAT-GTTTTAGAGCTA- |
| | | CCTTCCCGACTTCCGTAGGAGCGC- |
| | | TTTTTTTTcagccaactccaaTTTTTTTT- |
| | | GCGCTCCTACGGAAGTCGGGAAGG |
| pax9 | 293 | -GCGTGGGGTAAGGG-GTTTTAGAGCTA- |
| | | CCTGAAGGTAAAGATCGGGTCCTC- |
| | | TTTTTTTTcagccaactccaaTTTTTTTT- |
| | | GAGGACCCGATCTTTACCTTCAGG |
| pax9 | 294 | g-CACGGCAATTTCTC-GTTTTAGAGCTA- |
| | | CCTGAAGGTAAAGATCGGGTCCTC- |
| | | TTTTTTTTcagccaactccaaTTTTTTTT- |
| | | GAGGACCCGATCTTTACCTTCAGG |
| pax9 | 295 | -GTGACGCTAATATG-GTTTTAGAGCTA- |
| | | CCTGAAGGTAAAGATCGGGTCCTC- |
| | | TTTTTTTTcagccaactccaaTTTTTTTT- |
| | | GAGGACCCGATCTTTACCTTCAGG |
| pax9 | 296 | g-CCTAGGGGTAGGGA-GTTTTAGAGCTA- |
| | | CCTGAAGGTAAAGATCGGGTCCTC- |
| | | TTTTTTTTcagccaactccaaTTTTTTTT- |
| | | GAGGACCCGATCTTTACCTTCAGG |
| pax9 | 297 | g-AGGGGCGGGTCCGA-GTTTTAGAGCTA- |
| | | CCTGAAGGTAAAGATCGGGTCCTC- |
| | | TTTTTTTTcagccaactccaaTTTTTTTT- |
| | | GAGGACCCGATCTTTACCTTCAGG |
| pax9 | 298 | g-CTAAGCAGCAACGT-GTTTTAGAGCTA- |
| | | CCTGAAGGTAAAGATCGGGTCCTC- |
| | | TTTTTTTTcagccaactccaaTTTTTTTT- |
| | | GAGGACCCGATCTTTACCTTCAGG |
| pax9 | 299 | -GCTAGCTCCCCACC-GTTTTAGAGCTA- |
| | | CCTGAAGGTAAAGATCGGGTCCTC- |
| | | TTTTTTTTcagccaactccaaTTTTTTTT- |
| | | GAGGACCCGATCTTTACCTTCAGG |
| pax9 | 300 | g-AGCTGCATGGTGAT-GTTTTAGAGCTA- |
| | | CCTGAAGGTAAAGATCGGGTCCTC- |
| | | TTTTTTTTcagccaactccaaTTTTTTTT- |
| | | GAGGACCCGATCTTTACCTTCAGG |
| pax9 | 301 | -GCGTGGGGTAAGGG-GTTTTAGAGCTA- |
| | | CCTGGTTATAGCGGACGCACTGT- |
| | | TTTTTTTTcagccaactccaaTTTTTTTT- |
| | | ACAGTGCGTCCGCTATAACCAGG |
| pax9 | 302 | g-CACGGCAATTTCTC-GTTTTAGAGCTA- |
| | | CCTGGTTATAGCGGACGCACTGT- |
| | | TTTTTTTTcagccaactccaaTTTTTTTT- |
| | | ACAGTGCGTCCGCTATAACCAGG |
| pax9 | 303 | -GTGACGCTAATATG-GTTTTAGAGCTA- |
| | | CCTGGTTATAGCGGACGCACTGT- |
| | | TTTTTTTTcagccaactccaaTTTTTTTT- |
| | | ACAGTGCGTCCGCTATAACCAGG |
| pax9 | 304 | g-CCTAGGGGTAGGGA-GTTTTAGAGCTA- |
| | | CCTGGTTATAGCGGACGCACTGT- |
| | | TTTTTTTTcagccaactccaaTTTTTTTT- |
| | | ACAGTGCGTCCGCTATAACCAGG |
| pax9 | 305 | g-AGGGGCGGGTCCGA-GTTTTAGAGCTA- |
| | | CCTGGTTATAGCGGACGCACTGT- |
| | | TTTTTTTTcagccaactccaaTTTTTTTT- |
| | | ACAGTGCGTCCGCTATAACCAGG |
| pax9 | 306 | g-CTAAGCAGCAACGT-GTTTTAGAGCTA- |
| | | CCTGGTTATAGCGGACGCACTGT- |
| | | TTTTTTTTcagccaactccaaTTTTTTTT- |
| | | ACAGTGCGTCCGCTATAACCAGG |
| pax9 | 307 | -GCTAGCTCCCCACC-GTTTTAGAGCTA- |
| | | CCTGGTTATAGCGGACGCACTGT- |
| | | TTTTTTTTcagccaactccaaTTTTTTTT- |
| | | ACAGTGCGTCCGCTATAACCAGG |
| pax9 | 308 | g-AGCTGCATGGTGAT-GTTTTAGAGCTA- |
| | | CCTGGTTATAGCGGACGCACTGT- |
| | | TTTTTTTTcagccaactccaaTTTTTTTT- |
| | | ACAGTGCGTCCGCTATAACCAGG |
| pax9 | 309 | -GCGTGGGGTAAGGG-GTTTTAGAGCTA- |
| | | CCGCATCGTATTATCTGCGAAGC- |
| | | TTTTTTTTcagccaactccaaTTTTTTTT- |
| | | GCTTCGCAGATAATACGATGCGG |
| pax9 | 310 | g-CACGGCAATTTCTC-GTTTTAGAGCTA- |
| | | CCGCATCGTATTATCTGCGAAGC- |
| | | TTTTTTTTcagccaactccaaTTTTTTTT- |
| | | GCTTCGCAGATAATACGATGCGG |
| pax9 | 311 | -GTGACGCTAATATG-GTTTTAGAGCTA- |
| | | CCGCATCGTATTATCTGCGAAGC- |
| | | TTTTTTTTcagccaactccaaTTTTTTTT- |
| | | GCTTCGCAGATAATACGATGCGG |
| pax9 | 312 | g-CCTAGGGGTAGGGA-GTTTTAGAGCTA- |
| | | CCGCATCGTATTATCTGCGAAGC- |
| | | TTTTTTTTcagccaactccaaTTTTTTTT- |
| | | GCTTCGCAGATAATACGATGCGG |
| pax9 | 313 | g-AGGGGCGGGTCCGA-GTTTTAGAGCTA- |
| | | CCGCATCGTATTATCTGCGAAGC- |
| | | TTTTTTTTcagccaactccaaTTTTTTTT- |
| | | GCTTCGCAGATAATACGATGCGG |
| pax9 | 314 | g-CTAAGCAGCAACGT-GTTTTAGAGCTA- |
| | | CCGCATCGTATTATCTGCGAAGC- |
| | | TTTTTTTTcagccaactccaaTTTTTTTT- |
| | | GCTTCGCAGATAATACGATGCGG |
| pax9 | 315 | -GCTAGCTCCCCACC-GTTTTAGAGCTA- |
| | | CCGCATCGTATTATCTGCGAAGC- |
| | | TTTTTTTTcagccaactccaaTTTTTTTT- |
| | | GCTTCGCAGATAATACGATGCGG |
| pax9 | 316 | g-AGCTGCATGGTGAT-GTTTTAGAGCTA- |
| | | CCGCATCGTATTATCTGCGAAGC- |
| | | TTTTTTTTcagccaactccaaTTTTTTTT- |
| | | GCTTCGCAGATAATACGATGCGG |
| pax9 | 317 | -GCGTGGGGTAAGGG-GTTTTAGAGCTA- |
| | | CCGCTAGGACGTTCAACGGAGTC- |
| | | TTTTTTTTcagccaactccaaTTTTTTTT- |
| | | GACTCCGTTGAACGTCCTAGCGG |
| pax9 | 318 | g-CACGGCAATTTCTC-GTTTTAGAGCTA- |
| | | CCGCTAGGACGTTCAACGGAGTC- |
| | | TTTTTTTTcagccaactccaaTTTTTTTT- |
| | | GACTCCGTTGAACGTCCTAGCGG |
| pax9 | 319 | -GTGACGCTAATATG-GTTTTAGAGCTA- |
| | | CCGCTAGGACGTTCAACGGAGTC- |
| | | TTTTTTTTcagccaactccaaTTTTTTTT- |
| | | GACTCCGTTGAACGTCCTAGCGG |
| pax9 | 320 | g-CCTAGGGGTAGGGA-GTTTTAGAGCTA- |
| | | CCGCTAGGACGTTCAACGGAGTC- |
| | | TTTTTTTTcagccaactccaaTTTTTTTT- |
| | | GACTCCGTTGAACGTCCTAGCGG |
| pax9 | 321 | g-AGGGGCGGGTCCGA-GTTTTAGAGCTA- |
| | | CCGCTAGGACGTTCAACGGAGTC- |
| | | TTTTTTTTcagccaactccaaTTTTTTTT- |
| | | GACTCCGTTGAACGTCCTAGCGG |
| pax9 | 322 | g-CTAAGCAGCAACGT-GTTTTAGAGCTA- |
| | | CCGCTAGGACGTTCAACGGAGTC- |
| | | TTTTTTTTcagccaactccaaTTTTTTTT- |
| | | GACTCCGTTGAACGTCCTAGCGG |
| pax9 | 323 | -GCTAGCTCCCCACC-GTTTTAGAGCTA- |
| | | CCGCTAGGACGTTCAACGGAGTC- |
| | | TTTTTTTTcagccaactccaaTTTTTTTT- |
| | | GACTCCGTTGAACGTCCTAGCGG |
| pax9 | 324 | g-AGCTGCATGGTGAT-GTTTTAGAGCTA- |
| | | CCGCTAGGACGTTCAACGGAGTC- |
| | | TTTTTTTTcagccaactccaaTTTTTTTT- |
| | | GACTCCGTTGAACGTCCTAGCGG |
| pax9 | 325 | -GCGTGGGGTAAGGG-GTTTTAGAGCTA- |
| | | CCATAGCGGTACTATCGGCATCT- |
| | | TTTTTTTTcagccaactccaaTTTTTTTT- |
| | | AGATGCCGATAGTACCGCTATGG |
| pax9 | 326 | g-CACGGCAATTTCTC-GTTTTAGAGCTA- |
| | | CCATAGCGGTACTATCGGCATCT- |
| | | TTTTTTTTcagccaactccaaTTTTTTTT- |
| | | AGATGCCGATAGTACCGCTATGG |
| pax9 | 327 | -GTGACGCTAATATG-GTTTTAGAGCTA- |
| | | CCATAGCGGTACTATCGGCATCT- |
| | | TTTTTTTTcagccaactccaaTTTTTTTT- |
| | | AGATGCCGATAGTACCGCTATGG |
| pax9 | 328 | g-CCTAGGGGTAGGGA-GTTTTAGAGCTA- |
| | | CCATAGCGGTACTATCGGCATCT- |
| | | TTTTTTTTcagccaactccaaTTTTTTTT- |
| | | AGATGCCGATAGTACCGCTATGG |
| pax9 | 329 | g-AGGGGCGGGTCCGA-GTTTTAGAGCTA- |
| | | CCATAGCGGTACTATCGGCATCT- |
| | | TTTTTTTTcagccaactccaaTTTTTTTT- |
| | | AGATGCCGATAGTACCGCTATGG |
| pax9 | 330 | g-CTAAGCAGCAACGT-GTTTTAGAGCTA- |
| | | CCATAGCGGTACTATCGGCATCT- |
| | | TTTTTTTTcagccaactccaaTTTTTTTT- |
| | | AGATGCCGATAGTACCGCTATGG |
| pax9 | 331 | -GCTAGCTCCCCACC-GTTTTAGAGCTA- |
| | | CCATAGCGGTACTATCGGCATCT- |
| | | TTTTTTTTcagccaactccaaTTTTTTTT- |
| | | AGATGCCGATAGTACCGCTATGG |
| pax9 | 332 | g-AGCTGCATGGTGAT-GTTTTAGAGCTA- |
| | | CCATAGCGGTACTATCGGCATCT- |
| | | TTTTTTTTcagccaactccaaTTTTTTTT- |
| | | AGATGCCGATAGTACCGCTATGG |
| pax9 | 333 | -GCGTGGGGTAAGGG-GTTTTAGAGCTA- |
| | | CCTCGTACTAGTCTCGCATGACC- |
| | | TTTTTTTTcagccaactccaaTTTTTTTT- |
| | | GGTCATGCGAGACTAGTACGAGG |
| pax9 | 334 | g-CACGGCAATTTCTC-GTTTTAGAGCTA- |
| | | CCTCGTACTAGTCTCGCATGACC- |
| | | TTTTTTTTcagccaactccaaTTTTTTTT- |
| | | GGTCATGCGAGACTAGTACGAGG |
| pax9 | 335 | -GTGACGCTAATATG-GTTTTAGAGCTA- |
| | | CCTCGTACTAGTCTCGCATGACC- |
| | | TTTTTTTTcagccaactccaaTTTTTTTT- |
| | | GGTCATGCGAGACTAGTACGAGG |
| pax9 | 336 | g-CCTAGGGGTAGGGA-GTTTTAGAGCTA- |
| | | CCTCGTACTAGTCTCGCATGACC- |
| | | TTTTTTTTcagccaactccaaTTTTTTTT- |
| | | GGTCATGCGAGACTAGTACGAGG |
| pax9 | 337 | g-AGGGGCGGGTCCGA-GTTTTAGAGCTA- |
| | | CCTCGTACTAGTCTCGCATGACC- |
| | | TTTTTTTTcagccaactccaaTTTTTTTT- |
| | | GGTCATGCGAGACTAGTACGAGG |
| pax9 | 338 | g-CTAAGCAGCAACGT-GTTTTAGAGCTA- |
| | | CCTCGTACTAGTCTCGCATGACC- |
| | | TTTTTTTTcagccaactccaaTTTTTTTT- |
| | | GGTCATGCGAGACTAGTACGAGG |
| pax9 | 339 | -GCTAGCTCCCCACC-GTTTTAGAGCTA- |
| | | CCTCGTACTAGTCTCGCATGACC- |
| | | TTTTTTTTcagccaactccaaTTTTTTTT- |
| | | GGTCATGCGAGACTAGTACGAGG |
| pax9 | 340 | g-AGCTGCATGGTGAT-GTTTTAGAGCTA- |
| | | CCTCGTACTAGTCTCGCATGACC- |
| | | TTTTTTTTcagccaactccaaTTTTTTTT- |
| | | GGTCATGCGAGACTAGTACGAGG |
| pax9 | 341 | -GCGTGGGGTAAGGG-GTTTTAGAGCTA- |
| | | CCGATAGTGCTAAACGACGCTTT- |
| | | TTTTTTTTcagccaactccaaTTTTTTTT- |
| | | AAAGCGTCGTTTAGCACTATCGG |
| pax9 | 342 | g-CACGGCAATTTCTC-GTTTTAGAGCTA- |
| | | CCGATAGTGCTAAACGACGCTTT- |
| | | TTTTTTTTcagccaactccaaTTTTTTTT- |
| | | AAAGCGTCGTTTAGCACTATCGG |
| pax9 | 343 | -GTGACGCTAATATG-GTTTTAGAGCTA- |
| | | CCGATAGTGCTAAACGACGCTTT- |
| | | TTTTTTTTcagccaactccaaTTTTTTTT- |
| | | AAAGCGTCGTTTAGCACTATCGG |
| pax9 | 344 | g-CCTAGGGGTAGGGA-GTTTTAGAGCTA- |
| | | CCGATAGTGCTAAACGACGCTTT- |
| | | TTTTTTTTcagccaactccaaTTTTTTTT- |
| | | AAAGCGTCGTTTAGCACTATCGG |
| pax9 | 345 | g-AGGGGCGGGTCCGA-GTTTTAGAGCTA- |
| | | CCGATAGTGCTAAACGACGCTTT- |
| | | TTTTTTTTcagccaactccaaTTTTTTTT- |
| | | AAAGCGTCGTTTAGCACTATCGG |
| pax9 | 346 | g-CTAAGCAGCAACGT-GTTTTAGAGCTA- |
| | | CCGATAGTGCTAAACGACGCTTT- |
| | | TTTTTTTTcagccaactccaaTTTTTTTT- |
| | | AAAGCGTCGTTTAGCACTATCGG |
| pax9 | 347 | -GCTAGCTCCCCACC-GTTTTAGAGCTA- |
| | | CCGATAGTGCTAAACGACGCTTT- |
| | | TTTTTTTTcagccaactccaaTTTTTTTT- |
| | | AAAGCGTCGTTTAGCACTATCGG |
| pax9 | 348 | g-AGCTGCATGGTGAT-GTTTTAGAGCTA- |
| | | CCGATAGTGCTAAACGACGCTTT- |
| | | TTTTTTTTcagccaactccaaTTTTTTTT- |
| | | AAAGCGTCGTTTAGCACTATCGG |
| pax9 | 349 | -GCGTGGGGTAAGGG-GTTTTAGAGCTA- |
| | | CCCGTTATCGACGTTCAAGGAAC- |
| | | TTTTTTTTcagccaactccaaTTTTTTTT- |
| | | GTTCCTTGAACGTCGATAACGGG |
| pax9 | 350 | g-CACGGCAATTTCTC-GTTTTAGAGCTA- |
| | | CCCGTTATCGACGTTCAAGGAAC- |
| | | TTTTTTTTcagccaactccaaTTTTTTTT- |
| | | GTTCCTTGAACGTCGATAACGGG |
| pax9 | 351 | -GTGACGCTAATATG-GTTTTAGAGCTA- |
| | | CCCGTTATCGACGTTCAAGGAAC- |
| | | TTTTTTTTcagccaactccaaTTTTTTTT- |
| | | GTTCCTTGAACGTCGATAACGGG |
| pax9 | 352 | g-CCTAGGGGTAGGGA-GTTTTAGAGCTA- |
| | | CCCGTTATCGACGTTCAAGGAAC- |
| | | TTTTTTTTcagccaactccaaTTTTTTTT- |
| | | GTTCCTTGAACGTCGATAACGGG |
| pax9 | 353 | g-AGGGGCGGGTCCGA-GTTTTAGAGCTA- |
| | | CCCGTTATCGACGTTCAAGGAAC- |
| | | TTTTTTTTcagccaactccaaTTTTTTTT- |
| | | GTTCCTTGAACGTCGATAACGGG |
| pax9 | 354 | g-CTAAGCAGCAACGT-GTTTTAGAGCTA- |
| | | CCCGTTATCGACGTTCAAGGAAC- |
| | | TTTTTTTTcagccaactccaaTTTTTTTT- |
| | | GTTCCTTGAACGTCGATAACGGG |
| pax9 | 355 | -GCTAGCTCCCCACC-GTTTTAGAGCTA- |
| | | CCCGTTATCGACGTTCAAGGAAC- |
| | | TTTTTTTTcagccaactccaaTTTTTTTT- |
| | | GTTCCTTGAACGTCGATAACGGG |
| pax9 | 356 | g-AGCTGCATGGTGAT-GTTTTAGAGCTA- |
| | | CCCGTTATCGACGTTCAAGGAAC- |
| | | TTTTTTTTcagccaactccaaTTTTTTTT- |
| | | GTTCCTTGAACGTCGATAACGGG |
| pax9 | 357 | -GCGTGGGGTAAGGG-GTTTTAGAGCTA- |
| | | CCGATCAATGCGGTCTGCGTAAC- |
| | | TTTTTTTTcagccaactccaaTTTTTTTT- |
| | | GTTACGCAGACCGCATTGATCGG |
| pax9 | 358 | g-CACGGCAATTTCTC-GTTTTAGAGCTA- |
| | | CCGATCAATGCGGTCTGCGTAAC- |
| | | TTTTTTTTcagccaactccaaTTTTTTTT- |
| | | GTTACGCAGACCGCATTGATCGG |
| pax9 | 359 | -GTGACGCTAATATG-GTTTTAGAGCTA- |
| | | CCGATCAATGCGGTCTGCGTAAC- |
| | | TTTTTTTTcagccaactccaaTTTTTTTT- |
| | | GTTACGCAGACCGCATTGATCGG |
| pax9 | 360 | g-CCTAGGGGTAGGGA-GTTTTAGAGCTA- |
| | | CCGATCAATGCGGTCTGCGTAAC- |
| | | TTTTTTTTcagccaactccaaTTTTTTTT- |
| | | GTTACGCAGACCGCATTGATCGG |
| pax9 | 361 | g-AGGGGCGGGTCCGA-GTTTTAGAGCTA- |
| | | CCGATCAATGCGGTCTGCGTAAC- |
| | | TTTTTTTTcagccaactccaaTTTTTTTT- |
| | | GTTACGCAGACCGCATTGATCGG |
| pax9 | 362 | g-CTAAGCAGCAACGT-GTTTTAGAGCTA- |
| | | CCGATCAATGCGGTCTGCGTAAC- |
| | | TTTTTTTTcagccaactccaaTTTTTTTT- |
| | | GTTACGCAGACCGCATTGATCGG |
| pax9 | 363 | -GCTAGCTCCCCACC-GTTTTAGAGCTA- |
| | | CCGATCAATGCGGTCTGCGTAAC- |
| | | TTTTTTTTcagccaactccaaTTTTTTTT- |
| | | GTTACGCAGACCGCATTGATCGG |
| pax9 | 364 | g-AGCTGCATGGTGAT-GTTTTAGAGCTA- |
| | | CCGATCAATGCGGTCTGCGTAAC- |
| | | TTTTTTTTcagccaactccaaTTTTTTTT- |
| | | GTTACGCAGACCGCATTGATCGG |
| pax9 | 365 | -GCGTGGGGTAAGGG-GTTTTAGAGCTA- |
| | | CCCTTACTCGCGATACTCTCGAC- |
| | | TTTTTTTTcagccaactccaaTTTTTTTT- |
| | | GTCGAGAGTATCGCGAGTAAGGG |
| pax9 | 366 | g-CACGGCAATTTCTC-GTTTTAGAGCTA- |
| | | CCCTTACTCGCGATACTCTCGAC- |
| | | TTTTTTTTcagccaactccaaTTTTTTTT- |
| | | GTCGAGAGTATCGCGAGTAAGGG |
| pax9 | 367 | -GTGACGCTAATATG-GTTTTAGAGCTA- |
| | | CCCTTACTCGCGATACTCTCGAC- |
| | | TTTTTTTTcagccaactccaaTTTTTTTT- |
| | | GTCGAGAGTATCGCGAGTAAGGG |
| pax9 | 368 | g-CCTAGGGGTAGGGA-GTTTTAGAGCTA- |
| | | CCCTTACTCGCGATACTCTCGAC- |
| | | TTTTTTTTcagccaactccaaTTTTTTTT- |
| | | GTCGAGAGTATCGCGAGTAAGGG |
| pax9 | 369 | g-AGGGGCGGGTCCGA-GTTTTAGAGCTA- |
| | | CCCTTACTCGCGATACTCTCGAC- |
| | | TTTTTTTTcagccaactccaaTTTTTTTT- |
| | | GTCGAGAGTATCGCGAGTAAGGG |
| pax9 | 370 | g-CTAAGCAGCAACGT-GTTTTAGAGCTA- |
| | | CCCTTACTCGCGATACTCTCGAC- |
| | | TTTTTTTTcagccaactccaaTTTTTTTT- |
| | | GTCGAGAGTATCGCGAGTAAGGG |
| pax9 | 371 | -GCTAGCTCCCCACC-GTTTTAGAGCTA- |
| | | CCCTTACTCGCGATACTCTCGAC- |
| | | TTTTTTTTcagccaactccaaTTTTTTTT- |
| | | GTCGAGAGTATCGCGAGTAAGGG |
| pax9 | 372 | g-AGCTGCATGGTGAT-GTTTTAGAGCTA- |
| | | CCCTTACTCGCGATACTCTCGAC- |
| | | TTTTTTTTcagccaactccaaTTTTTTTT- |
| | | GTCGAGAGTATCGCGAGTAAGGG |
| pax9 | 373 | -GCGTGGGGTAAGGG-GTTTTAGAGCTA- |
| | | CCGCGGACGGTAAGCACGGAATA- |
| | | TTTTTTTTcagccaactccaaTTTTTTTT- |
| | | TATTCCGTGCTTACCGTCCGCGG |
| pax9 | 374 | g-CACGGCAATTTCTC-GTTTTAGAGCTA- |
| | | CCGCGGACGGTAAGCACGGAATA- |
| | | TTTTTTTTcagccaactccaaTTTTTTTT- |
| | | TATTCCGTGCTTACCGTCCGCGG |
| pax9 | 375 | -GTGACGCTAATATG-GTTTTAGAGCTA- |
| | | CCGCGGACGGTAAGCACGGAATA- |
| | | TTTTTTTTcagccaactccaaTTTTTTTT- |
| | | TATTCCGTGCTTACCGTCCGCGG |
| pax9 | 376 | g-CCTAGGGGTAGGGA-GTTTTAGAGCTA- |
| | | CCGCGGACGGTAAGCACGGAATA- |
| | | TTTTTTTTcagccaactccaaTTTTTTTT- |
| | | TATTCCGTGCTTACCGTCCGCGG |
| pax9 | 377 | g-AGGGGCGGGTCCGA-GTTTTAGAGCTA- |
| | | CCGCGGACGGTAAGCACGGAATA- |
| | | TTTTTTTTcagccaactccaaTTTTTTTT- |
| | | TATTCCGTGCTTACCGTCCGCGG |
| pax9 | 378 | g-CTAAGCAGCAACGT-GTTTTAGAGCTA- |
| | | CCGCGGACGGTAAGCACGGAATA- |
| | | TTTTTTTTcagccaactccaaTTTTTTTT- |
| | | TATTCCGTGCTTACCGTCCGCGG |
| pax9 | 379 | -GCTAGCTCCCCACC-GTTTTAGAGCTA- |
| | | CCGCGGACGGTAAGCACGGAATA- |
| | | TTTTTTTTcagccaactccaaTTTTTTTT- |
| | | TATTCCGTGCTTACCGTCCGCGG |
| pax9 | 380 | g-AGCTGCATGGTGAT-GTTTTAGAGCTA- |
| | | CCGCGGACGGTAAGCACGGAATA- |
| | | TTTTTTTTcagccaactccaaTTTTTTTT- |
| | | TATTCCGTGCTTACCGTCCGCGG |
| pax9 | 381 | -GCGTGGGGTAAGGG-GTTTTAGAGCTA- |
| | | CCTATAGTCACGAATCGTAGGGT- |
| | | TTTTTTTTcagccaactccaaTTTTTTTT- |
| | | ACCCTACGATTCGTGACTATAGG |
| pax9 | 382 | g-CACGGCAATTTCTC-GTTTTAGAGCTA- |
| | | CCTATAGTCACGAATCGTAGGGT- |
| | | TTTTTTTTcagccaactccaaTTTTTTTT- |
| | | ACCCTACGATTCGTGACTATAGG |
| pax9 | 383 | -GTGACGCTAATATG-GTTTTAGAGCTA- |
| | | CCTATAGTCACGAATCGTAGGGT- |
| | | TTTTTTTTcagccaactccaaTTTTTTTT- |
| | | ACCCTACGATTCGTGACTATAGG |
| pax9 | 384 | g-CCTAGGGGTAGGGA-GTTTTAGAGCTA- |
| | | CCTATAGTCACGAATCGTAGGGT- |
| | | TTTTTTTTcagccaactccaaTTTTTTTT- |
| | | ACCCTACGATTCGTGACTATAGG |
| pax9 | 385 | g-AGGGGCGGGTCCGA-GTTTTAGAGCTA- |
| | | CCTATAGTCACGAATCGTAGGGT- |
| | | TTTTTTTTcagccaactccaaTTTTTTTT- |
| | | ACCCTACGATTCGTGACTATAGG |
| pax9 | 386 | g-CTAAGCAGCAACGT-GTTTTAGAGCTA- |
| | | CCTATAGTCACGAATCGTAGGGT- |
| | | TTTTTTTTcagccaactccaaTTTTTTTT- |
| | | ACCCTACGATTCGTGACTATAGG |
| pax9 | 387 | -GCTAGCTCCCCACC-GTTTTAGAGCTA- |
| | | CCTATAGTCACGAATCGTAGGGT- |
| | | TTTTTTTTcagccaactccaaTTTTTTTT- |
| | | ACCCTACGATTCGTGACTATAGG |
| pax9 | 388 | g-AGCTGCATGGTGAT-GTTTTAGAGCTA- |
| | | CCTATAGTCACGAATCGTAGGGT- |
| | | TTTTTTTTcagccaactccaaTTTTTTTT- |
| | | ACCCTACGATTCGTGACTATAGG |
| pax9 | 389 | -GCGTGGGGTAAGGG-GTTTTAGAGCTA- |
| | | CCCGTCGTCACGTATGCGTAGCA- |
| | | TTTTTTTTcagccaactccaaTTTTTTTT- |
| | | TGCTACGCATACGTGACGACGGG |
| pax9 | 390 | g-CACGGCAATTTCTC-GTTTTAGAGCTA- |
| | | CCCGTCGTCACGTATGCGTAGCA- |
| | | TTTTTTTTcagccaactccaaTTTTTTTT- |
| | | TGCTACGCATACGTGACGACGGG |
| pax9 | 391 | -GTGACGCTAATATG-GTTTTAGAGCTA- |
| | | CCCGTCGTCACGTATGCGTAGCA- |
| | | TTTTTTTTcagccaactccaaTTTTTTTT- |
| | | TGCTACGCATACGTGACGACGGG |
| pax9 | 392 | g-CCTAGGGGTAGGGA-GTTTTAGAGCTA- |
| | | CCCGTCGTCACGTATGCGTAGCA- |
| | | TTTTTTTTcagccaactccaaTTTTTTTT- |
| | | TGCTACGCATACGTGACGACGGG |
| pax9 | 393 | g-AGGGGCGGGTCCGA-GTTTTAGAGCTA- |
| | | CCCGTCGTCACGTATGCGTAGCA- |
| | | TTTTTTTTcagccaactccaaTTTTTTTT- |
| | | TGCTACGCATACGTGACGACGGG |
| pax9 | 394 | g-CTAAGCAGCAACGT-GTTTTAGAGCTA- |
| | | CCCGTCGTCACGTATGCGTAGCA- |
| | | TTTTTTTTcagccaactccaaTTTTTTTT- |
| | | TGCTACGCATACGTGACGACGGG |
| pax9 | 395 | -GCTAGCTCCCCACC-GTTTTAGAGCTA- |
| | | CCCGTCGTCACGTATGCGTAGCA- |
| | | TTTTTTTTcagccaactccaaTTTTTTTT- |
| | | TGCTACGCATACGTGACGACGGG |
| pax9 | 396 | g-AGCTGCATGGTGAT-GTTTTAGAGCTA- |
| | | CCCGTCGTCACGTATGCGTAGCA- |
| | | TTTTTTTTcagccaactccaaTTTTTTTT- |
| | | TGCTACGCATACGTGACGACGGG |
| pax9 | 397 | -GCGTGGGGTAAGGG-GTTTTAGAGCTA- |
| | | CCCGAGAGGTAGTAGACGACGCA- |
| | | TTTTTTTTcagccaactccaaTTTTTTTT- |
| | | TGCGTCGTCTACTACCTCTCGGG |
| pax9 | 398 | g-CACGGCAATTTCTC-GTTTTAGAGCTA- |
| | | CCCGAGAGGTAGTAGACGACGCA- |
| | | TTTTTTTTcagccaactccaaTTTTTTTT- |
| | | TGCGTCGTCTACTACCTCTCGGG |
| pax9 | 399 | -GTGACGCTAATATG-GTTTTAGAGCTA- |
| | | CCCGAGAGGTAGTAGACGACGCA- |
| | | TTTTTTTTcagccaactccaaTTTTTTTT- |
| | | TGCGTCGTCTACTACCTCTCGGG |
| pax9 | 400 | g-CCTAGGGGTAGGGA-GTTTTAGAGCTA- |
| | | CCCGAGAGGTAGTAGACGACGCA- |
| | | TTTTTTTTcagccaactccaaTTTTTTTT- |
| | | TGCGTCGTCTACTACCTCTCGGG |
| pax9 | 401 | g-AGGGGCGGGTCCGA-GTTTTAGAGCTA- |
| | | CCCGAGAGGTAGTAGACGACGCA- |
| | | TTTTTTTTcagccaactccaaTTTTTTTT- |
| | | TGCGTCGTCTACTACCTCTCGGG |
| pax9 | 402 | g-CTAAGCAGCAACGT-GTTTTAGAGCTA- |
| | | CCCGAGAGGTAGTAGACGACGCA- |
| | | TTTTTTTTcagccaactccaaTTTTTTTT- |
| | | TGCGTCGTCTACTACCTCTCGGG |
| pax9 | 403 | -GCTAGCTCCCCACC-GTTTTAGAGCTA- |
| | | CCCGAGAGGTAGTAGACGACGCA- |
| | | TTTTTTTTcagccaactccaaTTTTTTTT- |
| | | TGCGTCGTCTACTACCTCTCGGG |
| pax9 | 404 | g-AGCTGCATGGTGAT-GTTTTAGAGCTA- |
| | | CCCGAGAGGTAGTAGACGACGCA- |
| | | TTTTTTTTcagccaactccaaTTTTTTTT- |
| | | TGCGTCGTCTACTACCTCTCGGG |
| pax9 | 405 | -GCGTGGGGTAAGGG-GTTTTAGAGCTA- |
| | | CCGACGTCTACGGACGGGAGCTA- |
| | | TTTTTTTTcagccaactccaaTTTTTTTT- |
| | | TAGCTCCCGTCCGTAGACGTCGG |
| pax9 | 406 | g-CACGGCAATTTCTC-GTTTTAGAGCTA- |
| | | CCGACGTCTACGGACGGGAGCTA- |
| | | TTTTTTTTcagccaactccaaTTTTTTTT- |
| | | TAGCTCCCGTCCGTAGACGTCGG |
| pax9 | 407 | -GTGACGCTAATATG-GTTTTAGAGCTA- |
| | | CCGACGTCTACGGACGGGAGCTA- |
| | | TTTTTTTTcagccaactccaaTTTTTTTT- |
| | | TAGCTCCCGTCCGTAGACGTCGG |
| pax9 | 408 | g-CCTAGGGGTAGGGA-GTTTTAGAGCTA- |
| | | CCGACGTCTACGGACGGGAGCTA- |
| | | TTTTTTTTcagccaactccaaTTTTTTTT- |
| | | TAGCTCCCGTCCGTAGACGTCGG |
| pax9 | 409 | g-AGGGGCGGGTCCGA-GTTTTAGAGCTA- |
| | | CCGACGTCTACGGACGGGAGCTA- |
| | | TTTTTTTTcagccaactccaaTTTTTTTT- |
| | | TAGCTCCCGTCCGTAGACGTCGG |
| pax9 | 410 | g-CTAAGCAGCAACGT-GTTTTAGAGCTA- |
| | | CCGACGTCTACGGACGGGAGCTA- |
| | | TTTTTTTTcagccaactccaaTTTTTTTT- |
| | | TAGCTCCCGTCCGTAGACGTCGG |
| pax9 | 411 | -GCTAGCTCCCCACC-GTTTTAGAGCTA- |
| | | CCGACGTCTACGGACGGGAGCTA- |
| | | TTTTTTTTcagccaactccaaTTTTTTTT- |
| | | TAGCTCCCGTCCGTAGACGTCGG |
| pax9 | 412 | g-AGCTGCATGGTGAT-GTTTTAGAGCTA- |
| | | CCGACGTCTACGGACGGGAGCTA- |
| | | TTTTTTTTcagccaactccaaTTTTTTTT- |
| | | TAGCTCCCGTCCGTAGACGTCGG |
| pax9 | 413 | -GCGTGGGGTAAGGG-GTTTTAGAGCTA- |
| | | CCAAAGCTCATTCGCGACTGAGC- |
| | | TTTTTTTTcagccaactccaaTTTTTTTT- |
| | | GCTCAGTCGCGAATGAGCTTTGG |
| pax9 | 414 | g-CACGGCAATTTCTC-GTTTTAGAGCTA- |
| | | CCAAAGCTCATTCGCGACTGAGC- |
| | | TTTTTTTTcagccaactccaaTTTTTTTT- |
| | | GCTCAGTCGCGAATGAGCTTTGG |
| pax9 | 415 | -GTGACGCTAATATG-GTTTTAGAGCTA- |
| | | CCAAAGCTCATTCGCGACTGAGC- |
| | | TTTTTTTTcagccaactccaaTTTTTTTT- |
| | | GCTCAGTCGCGAATGAGCTTTGG |
| pax9 | 416 | g-CCTAGGGGTAGGGA-GTTTTAGAGCTA- |
| | | CCAAAGCTCATTCGCGACTGAGC- |
| | | TTTTTTTTcagccaactccaaTTTTTTTT- |
| | | GCTCAGTCGCGAATGAGCTTTGG |
| pax9 | 417 | g-AGGGGCGGGTCCGA-GTTTTAGAGCTA- |
| | | CCAAAGCTCATTCGCGACTGAGC- |
| | | TTTTTTTTcagccaactccaaTTTTTTTT- |
| | | GCTCAGTCGCGAATGAGCTTTGG |
| pax9 | 418 | g-CTAAGCAGCAACGT-GTTTTAGAGCTA- |
| | | CCAAAGCTCATTCGCGACTGAGC- |
| | | TTTTTTTTcagccaactccaaTTTTTTTT- |
| | | GCTCAGTCGCGAATGAGCTTTGG |
| pax9 | 419 | -GCTAGCTCCCCACC-GTTTTAGAGCTA- |
| | | CCAAAGCTCATTCGCGACTGAGC- |
| | | TTTTTTTTcagccaactccaaTTTTTTTT- |
| | | GCTCAGTCGCGAATGAGCTTTGG |
| pax9 | 420 | g-AGCTGCATGGTGAT-GTTTTAGAGCTA- |
| | | CCAAAGCTCATTCGCGACTGAGC- |
| | | TTTTTTTTcagccaactccaaTTTTTTTT- |
| | | GCTCAGTCGCGAATGAGCTTTGG |
| pax9 | 421 | -GCGTGGGGTAAGGG-GTTTTAGAGCTA- |
| | | CCATGGCACGATCGACACGGAGG- |
| | | TTTTTTTTcagccaactccaaTTTTTTTT- |
| | | CCTCCGTGTCGATCGTGCCATGG |
| pax9 | 422 | g-CACGGCAATTTCTC-GTTTTAGAGCTA- |
| | | CCATGGCACGATCGACACGGAGG- |
| | | TTTTTTTTcagccaactccaaTTTTTTTT- |
| | | CCTCCGTGTCGATCGTGCCATGG |
| pax9 | 423 | -GTGACGCTAATATG-GTTTTAGAGCTA- |
| | | CCATGGCACGATCGACACGGAGG- |
| | | TTTTTTTTcagccaactccaaTTTTTTTT- |
| | | CCTCCGTGTCGATCGTGCCATGG |
| pax9 | 424 | g-CCTAGGGGTAGGGA-GTTTTAGAGCTA- |
| | | CCATGGCACGATCGACACGGAGG- |
| | | TTTTTTTTcagccaactccaaTTTTTTTT- |
| | | CCTCCGTGTCGATCGTGCCATGG |
| pax9 | 425 | g-AGGGGCGGGTCCGA-GTTTTAGAGCTA- |
| | | CCATGGCACGATCGACACGGAGG- |
| | | TTTTTTTTcagccaactccaaTTTTTTTT- |
| | | CCTCCGTGTCGATCGTGCCATGG |
| pax9 | 426 | g-CTAAGCAGCAACGT-GTTTTAGAGCTA- |
| | | CCATGGCACGATCGACACGGAGG- |
| | | TTTTTTTTcagccaactccaaTTTTTTTT- |
| | | CCTCCGTGTCGATCGTGCCATGG |
| pax9 | 427 | -GCTAGCTCCCCACC-GTTTTAGAGCTA- |
| | | CCATGGCACGATCGACACGGAGG- |
| | | TTTTTTTTcagccaactccaaTTTTTTTT- |
| | | CCTCCGTGTCGATCGTGCCATGG |
| pax9 | 428 | g-AGCTGCATGGTGAT-GTTTTAGAGCTA- |
| | | CCATGGCACGATCGACACGGAGG- |
| | | TTTTTTTTcagccaactccaaTTTTTTTT- |
| | | CCTCCGTGTCGATCGTGCCATGG |
| pax9 | 429 | -GCGTGGGGTAAGGG-GTTTTAGAGCTA- |
| | | CCCGAACTCTCTATCGAACGAGT- |
| | | TTTTTTTTcagccaactccaaTTTTTTTT- |
| | | ACTCGTTCGATAGAGAGTTCGGG |
| pax9 | 430 | g-CACGGCAATTTCTC-GTTTTAGAGCTA- |
| | | CCCGAACTCTCTATCGAACGAGT- |
| | | TTTTTTTTcagccaactccaaTTTTTTTT- |
| | | ACTCGTTCGATAGAGAGTTCGGG |
| pax9 | 431 | -GTGACGCTAATATG-GTTTTAGAGCTA- |
| | | CCCGAACTCTCTATCGAACGAGT- |
| | | TTTTTTTTcagccaactccaaTTTTTTTT- |
| | | ACTCGTTCGATAGAGAGTTCGGG |
| pax9 | 432 | g-CCTAGGGGTAGGGA-GTTTTAGAGCTA- |
| | | CCCGAACTCTCTATCGAACGAGT- |
| | | TTTTTTTTcagccaactccaaTTTTTTTT- |
| | | ACTCGTTCGATAGAGAGTTCGGG |
| pax9 | 433 | g-AGGGGCGGGTCCGA-GTTTTAGAGCTA- |
| | | CCCGAACTCTCTATCGAACGAGT- |
| | | TTTTTTTTcagccaactccaaTTTTTTTT- |
| | | ACTCGTTCGATAGAGAGTTCGGG |
| pax9 | 434 | g-CTAAGCAGCAACGT-GTTTTAGAGCTA- |
| | | CCCGAACTCTCTATCGAACGAGT- |
| | | TTTTTTTTcagccaactccaaTTTTTTTT- |
| | | ACTCGTTCGATAGAGAGTTCGGG |
| pax9 | 435 | -GCTAGCTCCCCACC-GTTTTAGAGCTA- |
| | | CCCGAACTCTCTATCGAACGAGT- |
| | | TTTTTTTTcagccaactccaaTTTTTTTT- |
| | | ACTCGTTCGATAGAGAGTTCGGG |
| pax9 | 436 | g-AGCTGCATGGTGAT-GTTTTAGAGCTA- |
| | | CCCGAACTCTCTATCGAACGAGT- |
| | | TTTTTTTTcagccaactccaaTTTTTTTT- |
| | | ACTCGTTCGATAGAGAGTTCGGG |
| pax9 | 437 | -GCGTGGGGTAAGGG-GTTTTAGAGCTA- |
| | | CCTACACGATAGTGGTCGTGCGC- |
| | | TTTTTTTTcagccaactccaaTTTTTTTT- |
| | | GCGCACGACCACTATCGTGTAGG |
| pax9 | 438 | g-CACGGCAATTTCTC-GTTTTAGAGCTA- |
| | | CCTACACGATAGTGGTCGTGCGC- |
| | | TTTTTTTTcagccaactccaaTTTTTTTT- |
| | | GCGCACGACCACTATCGTGTAGG |
| pax9 | 439 | -GTGACGCTAATATG-GTTTTAGAGCTA- |
| | | CCTACACGATAGTGGTCGTGCGC- |
| | | TTTTTTTTcagccaactccaaTTTTTTTT- |
| | | GCGCACGACCACTATCGTGTAGG |
| pax9 | 440 | g-CCTAGGGGTAGGGA-GTTTTAGAGCTA- |
| | | CCTACACGATAGTGGTCGTGCGC- |
| | | TTTTTTTTcagccaactccaaTTTTTTTT- |
| | | GCGCACGACCACTATCGTGTAGG |
| pax9 | 441 | g-AGGGGCGGGTCCGA-GTTTTAGAGCTA- |
| | | CCTACACGATAGTGGTCGTGCGC- |
| | | TTTTTTTTcagccaactccaaTTTTTTTT- |
| | | GCGCACGACCACTATCGTGTAGG |
| pax9 | 442 | g-CTAAGCAGCAACGT-GTTTTAGAGCTA- |
| | | CCTACACGATAGTGGTCGTGCGC- |
| | | TTTTTTTTcagccaactccaaTTTTTTTT- |
| | | GCGCACGACCACTATCGTGTAGG |
| pax9 | 443 | -GCTAGCTCCCCACC-GTTTTAGAGCTA- |
| | | CCTACACGATAGTGGTCGTGCGC- |
| | | TTTTTTTTcagccaactccaaTTTTTTTT- |
| | | GCGCACGACCACTATCGTGTAGG |
| pax9 | 444 | g-AGCTGCATGGTGAT-GTTTTAGAGCTA- |
| | | CCTACACGATAGTGGTCGTGCGC- |
| | | TTTTTTTTcagccaactccaaTTTTTTTT- |
| | | GCGCACGACCACTATCGTGTAGG |
| pax9 | 445 | -GCGTGGGGTAAGGG-GTTTTAGAGCTA- |
| | | CCCTGGCGGAACGTTCGAGTAAT- |
| | | TTTTTTTTcagccaactccaaTTTTTTTT- |
| | | ATTACTCGAACGTTCCGCCAGGG |
| pax9 | 446 | g-CACGGCAATTTCTC-GTTTTAGAGCTA- |
| | | CCCTGGCGGAACGTTCGAGTAAT- |
| | | TTTTTTTTcagccaactccaaTTTTTTTT- |
| | | ATTACTCGAACGTTCCGCCAGGG |
| pax9 | 447 | -GTGACGCTAATATG-GTTTTAGAGCTA- |
| | | CCCTGGCGGAACGTTCGAGTAAT- |
| | | TTTTTTTTcagccaactccaaTTTTTTTT- |
| | | ATTACTCGAACGTTCCGCCAGGG |
| pax9 | 448 | g-CCTAGGGGTAGGGA-GTTTTAGAGCTA- |
| | | CCCTGGCGGAACGTTCGAGTAAT- |
| | | TTTTTTTTcagccaactccaaTTTTTTTT- |
| | | ATTACTCGAACGTTCCGCCAGGG |
| pax9 | 449 | g-AGGGGCGGGTCCGA-GTTTTAGAGCTA- |
| | | CCCTGGCGGAACGTTCGAGTAAT- |
| | | TTTTTTTTcagccaactccaaTTTTTTTT- |
| | | ATTACTCGAACGTTCCGCCAGGG |
| pax9 | 450 | g-CTAAGCAGCAACGT-GTTTTAGAGCTA- |
| | | CCCTGGCGGAACGTTCGAGTAAT- |
| | | TTTTTTTTcagccaactccaaTTTTTTTT- |
| | | ATTACTCGAACGTTCCGCCAGGG |
| pax9 | 451 | -GCTAGCTCCCCACC-GTTTTAGAGCTA- |
| | | CCCTGGCGGAACGTTCGAGTAAT- |
| | | TTTTTTTTcagccaactccaaTTTTTTTT- |
| | | ATTACTCGAACGTTCCGCCAGGG |
| pax9 | 452 | g-AGCTGCATGGTGAT-GTTTTAGAGCTA- |
| | | CCCTGGCGGAACGTTCGAGTAAT- |
| | | TTTTTTTTcagccaactccaaTTTTTTTT- |
| | | ATTACTCGAACGTTCCGCCAGGG |
| pax9 | 453 | -GCGTGGGGTAAGGG-GTTTTAGAGCTA- |
| | | CCTACACTCGACATCGGTAGCTA- |
| | | TTTTTTTTcagccaactccaaTTTTTTTT- |
| | | TAGCTACCGATGTCGAGTGTAGG |
| pax9 | 454 | g-CACGGCAATTTCTC-GTTTTAGAGCTA- |
| | | CCTACACTCGACATCGGTAGCTA- |
| | | TTTTTTTTcagccaactccaaTTTTTTTT- |
| | | TAGCTACCGATGTCGAGTGTAGG |
| pax9 | 455 | -GTGACGCTAATATG-GTTTTAGAGCTA- |
| | | CCTACACTCGACATCGGTAGCTA- |
| | | TTTTTTTTcagccaactccaaTTTTTTTT- |
| | | TAGCTACCGATGTCGAGTGTAGG |
| pax9 | 456 | g-CCTAGGGGTAGGGA-GTTTTAGAGCTA- |
| | | CCTACACTCGACATCGGTAGCTA- |
| | | TTTTTTTTcagccaactccaaTTTTTTTT- |
| | | TAGCTACCGATGTCGAGTGTAGG |
| pax9 | 457 | g-AGGGGCGGGTCCGA-GTTTTAGAGCTA- |
| | | CCTACACTCGACATCGGTAGCTA- |
| | | TTTTTTTTcagccaactccaaTTTTTTTT- |
| | | TAGCTACCGATGTCGAGTGTAGG |
| pax9 | 458 | g-CTAAGCAGCAACGT-GTTTTAGAGCTA- |
| | | CCTACACTCGACATCGGTAGCTA- |
| | | TTTTTTTTcagccaactccaaTTTTTTTT- |
| | | TAGCTACCGATGTCGAGTGTAGG |
| pax9 | 459 | -GCTAGCTCCCCACC-GTTTTAGAGCTA- |
| | | CCTACACTCGACATCGGTAGCTA- |
| | | TTTTTTTTcagccaactccaaTTTTTTTT- |
| | | TAGCTACCGATGTCGAGTGTAGG |
| pax9 | 460 | g-AGCTGCATGGTGAT-GTTTTAGAGCTA- |
| | | CCTACACTCGACATCGGTAGCTA- |
| | | TTTTTTTTcagccaactccaaTTTTTTTT- |
| | | TAGCTACCGATGTCGAGTGTAGG |
| RUNX2 | 461 | g-CCTTACAGGAGTTT-GTTTTAGAGCTA- |
| | | CCGTCGTTGTACCGTCTACTTGAC- |
| | | TTTTTTTTcagccaactccaaTTTTTTTT- |
| | | GTCAAGTAGACGGTACAACGACGG |
| RUNX2 | 462 | g-CACTATTACTGGAG-GTTTTAGAGCTA- |
| | | CCGTCGTTGTACCGTCTACTTGAC- |
| | | TTTTTTTTcagccaactccaaTTTTTTTT- |
| | | GTCAAGTAGACGGTACAACGACGG |
| RUNX2 | 463 | g-ACTGCCTACCACTG-GTTTTAGAGCTA- |
| | | CCGTCGTTGTACCGTCTACTTGAC- |
| | | TTTTTTTTcagccaactccaaTTTTTTTT- |
| | | GTCAAGTAGACGGTACAACGACGG |
| RUNX2 | 464 | g-TGTATCACATTCTG-GTTTTAGAGCTA- |
| | | CCGTCGTTGTACCGTCTACTTGAC- |
| | | TTTTTTTTcagccaactccaaTTTTTTTT- |
| | | GTCAAGTAGACGGTACAACGACGG |
| RUNX2 | 465 | g-AAGAGGTAAGTCGT-GTTTTAGAGCTA- |
| | | CCGTCGTTGTACCGTCTACTTGAC- |
| | | TTTTTTTTcagccaactccaaTTTTTTTT- |
| | | GTCAAGTAGACGGTACAACGACGG |
| RUNX2 | 466 | -gcgcgcggcaatgc-GTTTTAGAGCTA- |
| | | CCGTCGTTGTACCGTCTACTTGAC- |
| | | TTTTTTTTcagccaactccaaTTTTTTTT- |
| | | GTCAAGTAGACGGTACAACGACGG |
| RUNX2 | 467 | g-AAGGAGCCTAGCCG-GTTTTAGAGCTA- |
| | | CCGTCGTTGTACCGTCTACTTGAC- |
| | | TTTTTTTTcagccaactccaaTTTTTTTT- |
| | | GTCAAGTAGACGGTACAACGACGG |
| RUNX2 | 468 | g-ACGCGGTGCCCCAA-GTTTTAGAGCTA- |
| | | CCGTCGTTGTACCGTCTACTTGAC- |
| | | TTTTTTTTcagccaactccaaTTTTTTTT- |
| | | GTCAAGTAGACGGTACAACGACGG |
| RUNX2 | 469 | g-CCTTACAGGAGTTT-GTTTTAGAGCTA- |
| | | CCTTCCCGACTTCCGTAGGAGCGC- |
| | | TTTTTTTTcagccaactccaaTTTTTTTT- |
| | | GCGCTCCTACGGAAGTCGGGAAGG |
| RUNX2 | 470 | g-CACTATTACTGGAG-GTTTTAGAGCTA- |
| | | CCTTCCCGACTTCCGTAGGAGCGC- |
| | | TTTTTTTTcagccaactccaaTTTTTTTT- |
| | | GCGCTCCTACGGAAGTCGGGAAGG |
| RUNX2 | 471 | g-ACTGCCTACCACTG-GTTTTAGAGCTA- |
| | | CCTTCCCGACTTCCGTAGGAGCGC- |
| | | TTTTTTTTcagccaactccaaTTTTTTTT- |
| | | GCGCTCCTACGGAAGTCGGGAAGG |
| RUNX2 | 472 | g-TGTATCACATTCTG-GTTTTAGAGCTA- |
| | | CCTTCCCGACTTCCGTAGGAGCGC- |
| | | TTTTTTTTcagccaactccaaTTTTTTTT- |
| | | GCGCTCCTACGGAAGTCGGGAAGG |
| RUNX2 | 473 | g-AAGAGGTAAGTCGT-GTTTTAGAGCTA- |
| | | CCTTCCCGACTTCCGTAGGAGCGC- |
| | | TTTTTTTTcagccaactccaaTTTTTTTT- |
| | | GCGCTCCTACGGAAGTCGGGAAGG |
| RUNX2 | 474 | -gcgcgcggcaatgc-GTTTTAGAGCTA- |
| | | CCTTCCCGACTTCCGTAGGAGCGC- |
| | | TTTTTTTTcagccaactccaaTTTTTTTT- |
| | | GCGCTCCTACGGAAGTCGGGAAGG |
| RUNX2 | 475 | g-AAGGAGCCTAGCCG-GTTTTAGAGCTA- |
| | | CCTTCCCGACTTCCGTAGGAGCGC- |
| | | TTTTTTTTcagccaactccaaTTTTTTTT- |
| | | GCGCTCCTACGGAAGTCGGGAAGG |
| RUNX2 | 476 | g-ACGCGGTGCCCCAA-GTTTTAGAGCTA- |
| | | CCTTCCCGACTTCCGTAGGAGCGC- |
| | | TTTTTTTTcagccaactccaaTTTTTTTT- |
| | | GCGCTCCTACGGAAGTCGGGAAGG |
| RUNX2 | 477 | g-CCTTACAGGAGTTT-GTTTTAGAGCTA- |
| | | CCTGAAGGTAAAGATCGGGTCCTC- |
| | | TTTTTTTTcagccaactccaaTTTTTTTT- |
| | | GAGGACCCGATCTTTACCTTCAGG |
| RUNX2 | 478 | g-CACTATTACTGGAG-GTTTTAGAGCTA- |
| | | CCTGAAGGTAAAGATCGGGTCCTC- |
| | | TTTTTTTTcagccaactccaaTTTTTTTT- |
| | | GAGGACCCGATCTTTACCTTCAGG |
| RUNX2 | 479 | g-ACTGCCTACCACTG-GTTTTAGAGCTA- |
| | | CCTGAAGGTAAAGATCGGGTCCTC- |
| | | TTTTTTTTcagccaactccaaTTTTTTTT- |
| | | GAGGACCCGATCTTTACCTTCAGG |
| RUNX2 | 480 | g-TGTATCACATTCTG-GTTTTAGAGCTA- |
| | | CCTGAAGGTAAAGATCGGGTCCTC- |
| | | TTTTTTTTcagccaactccaaTTTTTTTT- |
| | | GAGGACCCGATCTTTACCTTCAGG |
| RUNX2 | 481 | g-AAGAGGTAAGTCGT-GTTTTAGAGCTA- |
| | | CCTGAAGGTAAAGATCGGGTCCTC- |
| | | TTTTTTTTcagccaactccaaTTTTTTTT- |
| | | GAGGACCCGATCTTTACCTTCAGG |
| RUNX2 | 482 | -gcgcgcggcaatgc-GTTTTAGAGCTA- |
| | | CCTGAAGGTAAAGATCGGGTCCTC- |
| | | TTTTTTTTcagccaactccaaTTTTTTTT- |
| | | GAGGACCCGATCTTTACCTTCAGG |
| RUNX2 | 483 | g-AAGGAGCCTAGCCG-GTTTTAGAGCTA- |
| | | CCTGAAGGTAAAGATCGGGTCCTC- |
| | | TTTTTTTTcagccaactccaaTTTTTTTT- |
| | | GAGGACCCGATCTTTACCTTCAGG |
| RUNX2 | 484 | g-ACGCGGTGCCCCAA-GTTTTAGAGCTA- |
| | | CCTGAAGGTAAAGATCGGGTCCTC- |
| | | TTTTTTTTcagccaactccaaTTTTTTTT- |
| | | GAGGACCCGATCTTTACCTTCAGG |
| RUNX2 | 485 | g-CCTTACAGGAGTTT-GTTTTAGAGCTA- |
| | | CCTGGTTATAGCGGACGCACTGT- |
| | | TTTTTTTTcagccaactccaaTTTTTTTT- |
| | | ACAGTGCGTCCGCTATAACCAGG |
| RUNX2 | 486 | g-CACTATTACTGGAG-GTTTTAGAGCTA- |
| | | CCTGGTTATAGCGGACGCACTGT- |
| | | TTTTTTTTcagccaactccaaTTTTTTTT- |
| | | ACAGTGCGTCCGCTATAACCAGG |
| RUNX2 | 487 | g-ACTGCCTACCACTG-GTTTTAGAGCTA- |
| | | CCTGGTTATAGCGGACGCACTGT- |
| | | TTTTTTTTcagccaactccaaTTTTTTTT- |
| | | ACAGTGCGTCCGCTATAACCAGG |
| RUNX2 | 488 | g-TGTATCACATTCTG-GTTTTAGAGCTA- |
| | | CCTGGTTATAGCGGACGCACTGT- |
| | | TTTTTTTTcagccaactccaaTTTTTTTT- |
| | | ACAGTGCGTCCGCTATAACCAGG |
| RUNX2 | 489 | g-AAGAGGTAAGTCGT-GTTTTAGAGCTA- |
| | | CCTGGTTATAGCGGACGCACTGT- |
| | | TTTTTTTTcagccaactccaaTTTTTTTT- |
| | | ACAGTGCGTCCGCTATAACCAGG |
| RUNX2 | 490 | -gcgcgcggcaatgc-GTTTTAGAGCTA- |
| | | CCTGGTTATAGCGGACGCACTGT- |
| | | TTTTTTTTcagccaactccaaTTTTTTTT- |
| | | ACAGTGCGTCCGCTATAACCAGG |
| RUNX2 | 491 | g-AAGGAGCCTAGCCG-GTTTTAGAGCTA- |
| | | CCTGGTTATAGCGGACGCACTGT- |
| | | TTTTTTTTcagccaactccaaTTTTTTTT- |
| | | ACAGTGCGTCCGCTATAACCAGG |
| RUNX2 | 492 | g-ACGCGGTGCCCCAA-GTTTTAGAGCTA- |
| | | CCTGGTTATAGCGGACGCACTGT- |
| | | TTTTTTTTcagccaactccaaTTTTTTTT- |
| | | ACAGTGCGTCCGCTATAACCAGG |
| RUNX2 | 493 | g-CCTTACAGGAGTTT-GTTTTAGAGCTA- |
| | | CCGCATCGTATTATCTGCGAAGC- |
| | | TTTTTTTTcagccaactccaaTTTTTTTT- |
| | | GCTTCGCAGATAATACGATGCGG |
| RUNX2 | 494 | g-CACTATTACTGGAG-GTTTTAGAGCTA- |
| | | CCGCATCGTATTATCTGCGAAGC- |
| | | TTTTTTTTcagccaactccaaTTTTTTTT- |
| | | GCTTCGCAGATAATACGATGCGG |
| RUNX2 | 495 | g-ACTGCCTACCACTG-GTTTTAGAGCTA- |
| | | CCGCATCGTATTATCTGCGAAGC- |
| | | TTTTTTTTcagccaactccaaTTTTTTTT- |
| | | GCTTCGCAGATAATACGATGCGG |
| RUNX2 | 496 | g-TGTATCACATTCTG-GTTTTAGAGCTA- |
| | | CCGCATCGTATTATCTGCGAAGC- |
| | | TTTTTTTTcagccaactccaaTTTTTTTT- |
| | | GCTTCGCAGATAATACGATGCGG |
| RUNX2 | 497 | g-AAGAGGTAAGTCGT-GTTTTAGAGCTA- |
| | | CCGCATCGTATTATCTGCGAAGC- |
| | | TTTTTTTTcagccaactccaaTTTTTTTT- |
| | | GCTTCGCAGATAATACGATGCGG |
| RUNX2 | 498 | -gcgcgcggcaatgc-GTTTTAGAGCTA- |
| | | CCGCATCGTATTATCTGCGAAGC- |
| | | TTTTTTTTcagccaactccaaTTTTTTTT- |
| | | GCTTCGCAGATAATACGATGCGG |
| RUNX2 | 499 | g-AAGGAGCCTAGCCG-GTTTTAGAGCTA- |
| | | CCGCATCGTATTATCTGCGAAGC- |
| | | TTTTTTTTcagccaactccaaTTTTTTTT- |
| | | GCTTCGCAGATAATACGATGCGG |
| RUNX2 | 500 | g-ACGCGGTGCCCCAA-GTTTTAGAGCTA- |
| | | CCGCATCGTATTATCTGCGAAGC- |
| | | TTTTTTTTcagccaactccaaTTTTTTTT- |
| | | GCTTCGCAGATAATACGATGCGG |
| RUNX2 | 501 | g-CCTTACAGGAGTTT-GTTTTAGAGCTA- |
| | | CCGCTAGGACGTTCAACGGAGTC- |
| | | TTTTTTTTcagccaactccaaTTTTTTTT- |
| | | GACTCCGTTGAACGTCCTAGCGG |
| RUNX2 | 502 | g-CACTATTACTGGAG-GTTTTAGAGCTA- |
| | | CCGCTAGGACGTTCAACGGAGTC- |
| | | TTTTTTTTcagccaactccaaTTTTTTTT- |
| | | GACTCCGTTGAACGTCCTAGCGG |
| RUNX2 | 503 | g-ACTGCCTACCACTG-GTTTTAGAGCTA- |
| | | CCGCTAGGACGTTCAACGGAGTC- |
| | | TTTTTTTTcagccaactccaaTTTTTTTT- |
| | | GACTCCGTTGAACGTCCTAGCGG |
| RUNX2 | 504 | g-TGTATCACATTCTG-GTTTTAGAGCTA- |
| | | CCGCTAGGACGTTCAACGGAGTC- |
| | | TTTTTTTTcagccaactccaaTTTTTTTT- |
| | | GACTCCGTTGAACGTCCTAGCGG |
| RUNX2 | 505 | g-AAGAGGTAAGTCGT-GTTTTAGAGCTA- |
| | | CCGCTAGGACGTTCAACGGAGTC- |
| | | TTTTTTTTcagccaactccaaTTTTTTTT- |
| | | GACTCCGTTGAACGTCCTAGCGG |
| RUNX2 | 506 | -gcgcgcggcaatgc-GTTTTAGAGCTA- |
| | | CCGCTAGGACGTTCAACGGAGTC- |
| | | TTTTTTTTcagccaactccaaTTTTTTTT- |
| | | GACTCCGTTGAACGTCCTAGCGG |
| RUNX2 | 507 | g-AAGGAGCCTAGCCG-GTTTTAGAGCTA- |
| | | CCGCTAGGACGTTCAACGGAGTC- |
| | | TTTTTTTTcagccaactccaaTTTTTTTT- |
| | | GACTCCGTTGAACGTCCTAGCGG |
| RUNX2 | 508 | g-ACGCGGTGCCCCAA-GTTTTAGAGCTA- |
| | | CCGCTAGGACGTTCAACGGAGTC- |
| | | TTTTTTTTcagccaactccaaTTTTTTTT- |
| | | GACTCCGTTGAACGTCCTAGCGG |
| RUNX2 | 509 | g-CCTTACAGGAGTTT-GTTTTAGAGCTA- |
| | | CCATAGCGGTACTATCGGCATCT- |
| | | TTTTTTTTcagccaactccaaTTTTTTTT- |
| | | AGATGCCGATAGTACCGCTATGG |
| RUNX2 | 510 | g-CACTATTACTGGAG-GTTTTAGAGCTA- |
| | | CCATAGCGGTACTATCGGCATCT- |
| | | TTTTTTTTcagccaactccaaTTTTTTTT- |
| | | AGATGCCGATAGTACCGCTATGG |
| RUNX2 | 511 | g-ACTGCCTACCACTG-GTTTTAGAGCTA- |
| | | CCATAGCGGTACTATCGGCATCT- |
| | | TTTTTTTTcagccaactccaaTTTTTTTT- |
| | | AGATGCCGATAGTACCGCTATGG |
| RUNX2 | 512 | g-TGTATCACATTCTG-GTTTTAGAGCTA- |
| | | CCATAGCGGTACTATCGGCATCT- |
| | | TTTTTTTTcagccaactccaaTTTTTTTT- |
| | | AGATGCCGATAGTACCGCTATGG |
| RUNX2 | 513 | g-AAGAGGTAAGTCGT-GTTTTAGAGCTA- |
| | | CCATAGCGGTACTATCGGCATCT- |
| | | TTTTTTTTcagccaactccaaTTTTTTTT- |
| | | AGATGCCGATAGTACCGCTATGG |
| RUNX2 | 514 | -gcgcgcggcaatgc-GTTTTAGAGCTA- |
| | | CCATAGCGGTACTATCGGCATCT- |
| | | TTTTTTTTcagccaactccaaTTTTTTTT- |
| | | AGATGCCGATAGTACCGCTATGG |
| RUNX2 | 515 | g-AAGGAGCCTAGCCG-GTTTTAGAGCTA- |
| | | CCATAGCGGTACTATCGGCATCT- |
| | | TTTTTTTTcagccaactccaaTTTTTTTT- |
| | | AGATGCCGATAGTACCGCTATGG |
| RUNX2 | 516 | g-ACGCGGTGCCCCAA-GTTTTAGAGCTA- |
| | | CCATAGCGGTACTATCGGCATCT- |
| | | TTTTTTTTcagccaactccaaTTTTTTTT- |
| | | AGATGCCGATAGTACCGCTATGG |
| RUNX2 | 517 | g-CCTTACAGGAGTTT-GTTTTAGAGCTA- |
| | | CCTCGTACTAGTCTCGCATGACC- |
| | | TTTTTTTTcagccaactccaaTTTTTTTT- |
| | | GGTCATGCGAGACTAGTACGAGG |
| RUNX2 | 518 | g-CACTATTACTGGAG-GTTTTAGAGCTA- |
| | | CCTCGTACTAGTCTCGCATGACC- |
| | | TTTTTTTTcagccaactccaaTTTTTTTT- |
| | | GGTCATGCGAGACTAGTACGAGG |
| RUNX2 | 519 | g-ACTGCCTACCACTG-GTTTTAGAGCTA- |
| | | CCTCGTACTAGTCTCGCATGACC- |
| | | TTTTTTTTcagccaactccaaTTTTTTTT- |
| | | GGTCATGCGAGACTAGTACGAGG |
| RUNX2 | 520 | g-TGTATCACATTCTG-GTTTTAGAGCTA- |
| | | CCTCGTACTAGTCTCGCATGACC- |
| | | TTTTTTTTcagccaactccaaTTTTTTTT- |
| | | GGTCATGCGAGACTAGTACGAGG |
| RUNX2 | 521 | g-AAGAGGTAAGTCGT-GTTTTAGAGCTA- |
| | | CCTCGTACTAGTCTCGCATGACC- |
| | | TTTTTTTTcagccaactccaaTTTTTTTT- |
| | | GGTCATGCGAGACTAGTACGAGG |
| RUNX2 | 522 | -gcgcgcggcaatgc-GTTTTAGAGCTA- |
| | | CCTCGTACTAGTCTCGCATGACC- |
| | | TTTTTTTTcagccaactccaaTTTTTTTT- |
| | | GGTCATGCGAGACTAGTACGAGG |
| RUNX2 | 523 | g-AAGGAGCCTAGCCG-GTTTTAGAGCTA- |
| | | CCTCGTACTAGTCTCGCATGACC- |
| | | TTTTTTTTcagccaactccaaTTTTTTTT- |
| | | GGTCATGCGAGACTAGTACGAGG |
| RUNX2 | 524 | g-ACGCGGTGCCCCAA-GTTTTAGAGCTA- |
| | | CCTCGTACTAGTCTCGCATGACC- |
| | | TTTTTTTTcagccaactccaaTTTTTTTT- |
| | | GGTCATGCGAGACTAGTACGAGG |
| RUNX2 | 525 | g-CCTTACAGGAGTTT-GTTTTAGAGCTA- |
| | | CCGATAGTGCTAAACGACGCTTT- |
| | | TTTTTTTTcagccaactccaaTTTTTTTT- |
| | | AAAGCGTCGTTTAGCACTATCGG |
| RUNX2 | 526 | g-CACTATTACTGGAG-GTTTTAGAGCTA- |
| | | CCGATAGTGCTAAACGACGCTTT- |
| | | TTTTTTTTcagccaactccaaTTTTTTTT- |
| | | AAAGCGTCGTTTAGCACTATCGG |
| RUNX2 | 527 | g-ACTGCCTACCACTG-GTTTTAGAGCTA- |
| | | CCGATAGTGCTAAACGACGCTTT- |
| | | TTTTTTTTcagccaactccaaTTTTTTTT- |
| | | AAAGCGTCGTTTAGCACTATCGG |
| RUNX2 | 528 | g-TGTATCACATTCTG-GTTTTAGAGCTA- |
| | | CCGATAGTGCTAAACGACGCTTT- |
| | | TTTTTTTTcagccaactccaaTTTTTTTT- |
| | | AAAGCGTCGTTTAGCACTATCGG |
| RUNX2 | 529 | g-AAGAGGTAAGTCGT-GTTTTAGAGCTA- |
| | | CCGATAGTGCTAAACGACGCTTT- |
| | | TTTTTTTTcagccaactccaaTTTTTTTT- |
| | | AAAGCGTCGTTTAGCACTATCGG |
| RUNX2 | 530 | -gcgcgcggcaatgc-GTTTTAGAGCTA- |
| | | CCGATAGTGCTAAACGACGCTTT- |
| | | TTTTTTTTcagccaactccaaTTTTTTTT- |
| | | AAAGCGTCGTTTAGCACTATCGG |
| RUNX2 | 531 | g-AAGGAGCCTAGCCG-GTTTTAGAGCTA- |
| | | CCGATAGTGCTAAACGACGCTTT- |
| | | TTTTTTTTcagccaactccaaTTTTTTTT- |
| | | AAAGCGTCGTTTAGCACTATCGG |
| RUNX2 | 532 | g-ACGCGGTGCCCCAA-GTTTTAGAGCTA- |
| | | CCGATAGTGCTAAACGACGCTTT- |
| | | TTTTTTTTcagccaactccaaTTTTTTTT- |
| | | AAAGCGTCGTTTAGCACTATCGG |
| RUNX2 | 533 | g-CCTTACAGGAGTTT-GTTTTAGAGCTA- |
| | | CCCGTTATCGACGTTCAAGGAAC- |
| | | TTTTTTTTcagccaactccaaTTTTTTTT- |
| | | GTTCCTTGAACGTCGATAACGGG |
| RUNX2 | 534 | g-CACTATTACTGGAG-GTTTTAGAGCTA- |
| | | CCCGTTATCGACGTTCAAGGAAC- |
| | | TTTTTTTTcagccaactccaaTTTTTTTT- |
| | | GTTCCTTGAACGTCGATAACGGG |
| RUNX2 | 535 | g-ACTGCCTACCACTG-GTTTTAGAGCTA- |
| | | CCCGTTATCGACGTTCAAGGAAC- |
| | | TTTTTTTTcagccaactccaaTTTTTTTT- |
| | | GTTCCTTGAACGTCGATAACGGG |
| RUNX2 | 536 | g-TGTATCACATTCTG-GTTTTAGAGCTA- |
| | | CCCGTTATCGACGTTCAAGGAAC- |
| | | TTTTTTTTcagccaactccaaTTTTTTTT- |
| | | GTTCCTTGAACGTCGATAACGGG |
| RUNX2 | 537 | g-AAGAGGTAAGTCGT-GTTTTAGAGCTA- |
| | | CCCGTTATCGACGTTCAAGGAAC- |
| | | TTTTTTTTcagccaactccaaTTTTTTTT- |
| | | GTTCCTTGAACGTCGATAACGGG |
| RUNX2 | 538 | -gcgcgcggcaatgc-GTTTTAGAGCTA- |
| | | CCCGTTATCGACGTTCAAGGAAC- |
| | | TTTTTTTTcagccaactccaaTTTTTTTT- |
| | | GTTCCTTGAACGTCGATAACGGG |
| RUNX2 | 539 | g-AAGGAGCCTAGCCG-GTTTTAGAGCTA- |
| | | CCCGTTATCGACGTTCAAGGAAC- |
| | | TTTTTTTTcagccaactccaaTTTTTTTT- |
| | | GTTCCTTGAACGTCGATAACGGG |
| RUNX2 | 540 | g-ACGCGGTGCCCCAA-GTTTTAGAGCTA- |
| | | CCCGTTATCGACGTTCAAGGAAC- |
| | | TTTTTTTTcagccaactccaaTTTTTTTT- |
| | | GTTCCTTGAACGTCGATAACGGG |
| RUNX2 | 541 | g-CCTTACAGGAGTTT-GTTTTAGAGCTA- |
| | | CCGATCAATGCGGTCTGCGTAAC- |
| | | TTTTTTTTcagccaactccaaTTTTTTTT- |
| | | GTTACGCAGACCGCATTGATCGG |
| RUNX2 | 542 | g-CACTATTACTGGAG-GTTTTAGAGCTA- |
| | | CCGATCAATGCGGTCTGCGTAAC- |
| | | TTTTTTTTcagccaactccaaTTTTTTTT- |
| | | GTTACGCAGACCGCATTGATCGG |
| RUNX2 | 543 | g-ACTGCCTACCACTG-GTTTTAGAGCTA- |
| | | CCGATCAATGCGGTCTGCGTAAC- |
| | | TTTTTTTTcagccaactccaaTTTTTTTT- |
| | | GTTACGCAGACCGCATTGATCGG |
| RUNX2 | 544 | g-TGTATCACATTCTG-GTTTTAGAGCTA- |
| | | CCGATCAATGCGGTCTGCGTAAC- |
| | | TTTTTTTTcagccaactccaaTTTTTTTT- |
| | | GTTACGCAGACCGCATTGATCGG |
| RUNX2 | 545 | g-AAGAGGTAAGTCGT-GTTTTAGAGCTA- |
| | | CCGATCAATGCGGTCTGCGTAAC- |
| | | TTTTTTTTcagccaactccaaTTTTTTTT- |
| | | GTTACGCAGACCGCATTGATCGG |
| RUNX2 | 546 | -gcgcgcggcaatgc-GTTTTAGAGCTA- |
| | | CCGATCAATGCGGTCTGCGTAAC- |
| | | TTTTTTTTcagccaactccaaTTTTTTTT- |
| | | GTTACGCAGACCGCATTGATCGG |
| RUNX2 | 547 | g-AAGGAGCCTAGCCG-GTTTTAGAGCTA- |
| | | CCGATCAATGCGGTCTGCGTAAC- |
| | | TTTTTTTTcagccaactccaaTTTTTTTT- |
| | | GTTACGCAGACCGCATTGATCGG |
| RUNX2 | 548 | g-ACGCGGTGCCCCAA-GTTTTAGAGCTA- |
| | | CCGATCAATGCGGTCTGCGTAAC- |
| | | TTTTTTTTcagccaactccaaTTTTTTTT- |
| | | GTTACGCAGACCGCATTGATCGG |
| RUNX2 | 549 | g-CCTTACAGGAGTTT-GTTTTAGAGCTA- |
| | | CCCTTACTCGCGATACTCTCGAC- |
| | | TTTTTTTTcagccaactccaaTTTTTTTT- |
| | | GTCGAGAGTATCGCGAGTAAGGG |
| RUNX2 | 550 | g-CACTATTACTGGAG-GTTTTAGAGCTA- |
| | | CCCTTACTCGCGATACTCTCGAC- |
| | | TTTTTTTTcagccaactccaaTTTTTTTT- |
| | | GTCGAGAGTATCGCGAGTAAGGG |
| RUNX2 | 551 | g-ACTGCCTACCACTG-GTTTTAGAGCTA- |
| | | CCCTTACTCGCGATACTCTCGAC- |
| | | TTTTTTTTcagccaactccaaTTTTTTTT- |
| | | GTCGAGAGTATCGCGAGTAAGGG |
| RUNX2 | 552 | g-TGTATCACATTCTG-GTTTTAGAGCTA- |
| | | CCCTTACTCGCGATACTCTCGAC- |
| | | TTTTTTTTcagccaactccaaTTTTTTTT- |
| | | GTCGAGAGTATCGCGAGTAAGGG |
| RUNX2 | 553 | g-AAGAGGTAAGTCGT-GTTTTAGAGCTA- |
| | | CCCTTACTCGCGATACTCTCGAC- |
| | | TTTTTTTTcagccaactccaaTTTTTTTT- |
| | | GTCGAGAGTATCGCGAGTAAGGG |
| RUNX2 | 554 | -gcgcgcggcaatgc-GTTTTAGAGCTA- |
| | | CCCTTACTCGCGATACTCTCGAC- |
| | | TTTTTTTTcagccaactccaaTTTTTTTT- |
| | | GTCGAGAGTATCGCGAGTAAGGG |
| RUNX2 | 555 | g-AAGGAGCCTAGCCG-GTTTTAGAGCTA- |
| | | CCCTTACTCGCGATACTCTCGAC- |
| | | TTTTTTTTcagccaactccaaTTTTTTTT- |
| | | GTCGAGAGTATCGCGAGTAAGGG |
| RUNX2 | 556 | g-ACGCGGTGCCCCAA-GTTTTAGAGCTA- |
| | | CCCTTACTCGCGATACTCTCGAC- |
| | | TTTTTTTTcagccaactccaaTTTTTTTT- |
| | | GTCGAGAGTATCGCGAGTAAGGG |
| RUNX2 | 557 | g-CCTTACAGGAGTTT-GTTTTAGAGCTA- |
| | | CCGCGGACGGTAAGCACGGAATA- |
| | | TTTTTTTTcagccaactccaaTTTTTTTT- |
| | | TATTCCGTGCTTACCGTCCGCGG |
| RUNX2 | 558 | g-CACTATTACTGGAG-GTTTTAGAGCTA- |
| | | CCGCGGACGGTAAGCACGGAATA- |
| | | TTTTTTTTcagccaactccaaTTTTTTTT- |
| | | TATTCCGTGCTTACCGTCCGCGG |
| RUNX2 | 559 | g-ACTGCCTACCACTG-GTTTTAGAGCTA- |
| | | CCGCGGACGGTAAGCACGGAATA- |
| | | TTTTTTTTcagccaactccaaTTTTTTTT- |
| | | TATTCCGTGCTTACCGTCCGCGG |
| RUNX2 | 560 | g-TGTATCACATTCTG-GTTTTAGAGCTA- |
| | | CCGCGGACGGTAAGCACGGAATA- |
| | | TTTTTTTTcagccaactccaaTTTTTTTT- |
| | | TATTCCGTGCTTACCGTCCGCGG |
| RUNX2 | 561 | g-AAGAGGTAAGTCGT-GTTTTAGAGCTA- |
| | | CCGCGGACGGTAAGCACGGAATA- |
| | | TTTTTTTTcagccaactccaaTTTTTTTT- |
| | | TATTCCGTGCTTACCGTCCGCGG |
| RUNX2 | 562 | -gcgcgcggcaatgc-GTTTTAGAGCTA- |
| | | CCGCGGACGGTAAGCACGGAATA- |
| | | TTTTTTTTcagccaactccaaTTTTTTTT- |
| | | TATTCCGTGCTTACCGTCCGCGG |
| RUNX2 | 563 | g-AAGGAGCCTAGCCG-GTTTTAGAGCTA- |
| | | CCGCGGACGGTAAGCACGGAATA- |
| | | TTTTTTTTcagccaactccaaTTTTTTTT- |
| | | TATTCCGTGCTTACCGTCCGCGG |
| RUNX2 | 564 | g-ACGCGGTGCCCCAA-GTTTTAGAGCTA- |
| | | CCGCGGACGGTAAGCACGGAATA- |
| | | TTTTTTTTcagccaactccaaTTTTTTTT- |
| | | TATTCCGTGCTTACCGTCCGCGG |
| RUNX2 | 565 | g-CCTTACAGGAGTTT-GTTTTAGAGCTA- |
| | | CCTATAGTCACGAATCGTAGGGT- |
| | | TTTTTTTTcagccaactccaaTTTTTTTT- |
| | | ACCCTACGATTCGTGACTATAGG |
| RUNX2 | 566 | g-CACTATTACTGGAG-GTTTTAGAGCTA- |
| | | CCTATAGTCACGAATCGTAGGGT- |
| | | TTTTTTTTcagccaactccaaTTTTTTTT- |
| | | ACCCTACGATTCGTGACTATAGG |
| RUNX2 | 567 | g-ACTGCCTACCACTG-GTTTTAGAGCTA- |
| | | CCTATAGTCACGAATCGTAGGGT- |
| | | TTTTTTTTcagccaactccaaTTTTTTTT- |
| | | ACCCTACGATTCGTGACTATAGG |
| RUNX2 | 568 | g-TGTATCACATTCTG-GTTTTAGAGCTA- |
| | | CCTATAGTCACGAATCGTAGGGT- |
| | | TTTTTTTTcagccaactccaaTTTTTTTT- |
| | | ACCCTACGATTCGTGACTATAGG |
| RUNX2 | 569 | g-AAGAGGTAAGTCGT-GTTTTAGAGCTA- |
| | | CCTATAGTCACGAATCGTAGGGT- |
| | | TTTTTTTTcagccaactccaaTTTTTTTT- |
| | | ACCCTACGATTCGTGACTATAGG |
| RUNX2 | 570 | -gcgcgcggcaatgc-GTTTTAGAGCTA- |
| | | CCTATAGTCACGAATCGTAGGGT- |
| | | TTTTTTTTcagccaactccaaTTTTTTTT- |
| | | ACCCTACGATTCGTGACTATAGG |
| RUNX2 | 571 | g-AAGGAGCCTAGCCG-GTTTTAGAGCTA- |
| | | CCTATAGTCACGAATCGTAGGGT- |
| | | TTTTTTTTcagccaactccaaTTTTTTTT- |
| | | ACCCTACGATTCGTGACTATAGG |
| RUNX2 | 572 | g-ACGCGGTGCCCCAA-GTTTTAGAGCTA- |
| | | CCTATAGTCACGAATCGTAGGGT- |
| | | TTTTTTTTcagccaactccaaTTTTTTTT- |
| | | ACCCTACGATTCGTGACTATAGG |
| RUNX2 | 573 | g-CCTTACAGGAGTTT-GTTTTAGAGCTA- |
| | | CCCGTCGTCACGTATGCGTAGCA- |
| | | TTTTTTTTcagccaactccaaTTTTTTTT- |
| | | TGCTACGCATACGTGACGACGGG |
| RUNX2 | 574 | g-CACTATTACTGGAG-GTTTTAGAGCTA- |
| | | CCCGTCGTCACGTATGCGTAGCA- |
| | | TTTTTTTTcagccaactccaaTTTTTTTT- |
| | | TGCTACGCATACGTGACGACGGG |
| RUNX2 | 575 | g-ACTGCCTACCACTG-GTTTTAGAGCTA- |
| | | CCCGTCGTCACGTATGCGTAGCA- |
| | | TTTTTTTTcagccaactccaaTTTTTTTT- |
| | | TGCTACGCATACGTGACGACGGG |
| RUNX2 | 576 | g-TGTATCACATTCTG-GTTTTAGAGCTA- |
| | | CCCGTCGTCACGTATGCGTAGCA- |
| | | TTTTTTTTcagccaactccaaTTTTTTTT- |
| | | TGCTACGCATACGTGACGACGGG |
| RUNX2 | 577 | g-AAGAGGTAAGTCGT-GTTTTAGAGCTA- |
| | | CCCGTCGTCACGTATGCGTAGCA- |
| | | TTTTTTTTcagccaactccaaTTTTTTTT- |
| | | TGCTACGCATACGTGACGACGGG |
| RUNX2 | 578 | -gcgcgcggcaatgc-GTTTTAGAGCTA- |
| | | CCCGTCGTCACGTATGCGTAGCA- |
| | | TTTTTTTTcagccaactccaaTTTTTTTT- |
| | | TGCTACGCATACGTGACGACGGG |
| RUNX2 | 579 | g-AAGGAGCCTAGCCG-GTTTTAGAGCTA- |
| | | CCCGTCGTCACGTATGCGTAGCA- |
| | | TTTTTTTTcagccaactccaaTTTTTTTT- |
| | | TGCTACGCATACGTGACGACGGG |
| RUNX2 | 580 | g-ACGCGGTGCCCCAA-GTTTTAGAGCTA- |
| | | CCCGTCGTCACGTATGCGTAGCA- |
| | | TTTTTTTTcagccaactccaaTTTTTTTT- |
| | | TGCTACGCATACGTGACGACGGG |
| RUNX2 | 581 | g-CCTTACAGGAGTTT-GTTTTAGAGCTA- |
| | | CCCGAGAGGTAGTAGACGACGCA- |
| | | TTTTTTTTcagccaactccaaTTTTTTTT- |
| | | TGCGTCGTCTACTACCTCTCGGG |
| RUNX2 | 582 | g-CACTATTACTGGAG-GTTTTAGAGCTA- |
| | | CCCGAGAGGTAGTAGACGACGCA- |
| | | TTTTTTTTcagccaactccaaTTTTTTTT- |
| | | TGCGTCGTCTACTACCTCTCGGG |
| RUNX2 | 583 | g-ACTGCCTACCACTG-GTTTTAGAGCTA- |
| | | CCCGAGAGGTAGTAGACGACGCA- |
| | | TTTTTTTTcagccaactccaaTTTTTTTT- |
| | | TGCGTCGTCTACTACCTCTCGGG |
| RUNX2 | 584 | g-TGTATCACATTCTG-GTTTTAGAGCTA- |
| | | CCCGAGAGGTAGTAGACGACGCA- |
| | | TTTTTTTTcagccaactccaaTTTTTTTT- |
| | | TGCGTCGTCTACTACCTCTCGGG |
| RUNX2 | 585 | g-AAGAGGTAAGTCGT-GTTTTAGAGCTA- |
| | | CCCGAGAGGTAGTAGACGACGCA- |
| | | TTTTTTTTcagccaactccaaTTTTTTTT- |
| | | TGCGTCGTCTACTACCTCTCGGG |
| RUNX2 | 586 | -gcgcgcggcaatgc-GTTTTAGAGCTA- |
| | | CCCGAGAGGTAGTAGACGACGCA- |
| | | TTTTTTTTcagccaactccaaTTTTTTTT- |
| | | TGCGTCGTCTACTACCTCTCGGG |
| RUNX2 | 587 | g-AAGGAGCCTAGCCG-GTTTTAGAGCTA- |
| | | CCCGAGAGGTAGTAGACGACGCA- |
| | | TTTTTTTTcagccaactccaaTTTTTTTT- |
| | | TGCGTCGTCTACTACCTCTCGGG |
| RUNX2 | 588 | g-ACGCGGTGCCCCAA-GTTTTAGAGCTA- |
| | | CCCGAGAGGTAGTAGACGACGCA- |
| | | TTTTTTTTcagccaactccaaTTTTTTTT- |
| | | TGCGTCGTCTACTACCTCTCGGG |
| RUNX2 | 589 | g-CCTTACAGGAGTTT-GTTTTAGAGCTA- |
| | | CCGACGTCTACGGACGGGAGCTA- |
| | | TTTTTTTTcagccaactccaaTTTTTTTT- |
| | | TAGCTCCCGTCCGTAGACGTCGG |
| RUNX2 | 590 | g-CACTATTACTGGAG-GTTTTAGAGCTA- |
| | | CCGACGTCTACGGACGGGAGCTA- |
| | | TTTTTTTTcagccaactccaaTTTTTTTT- |
| | | TAGCTCCCGTCCGTAGACGTCGG |
| RUNX2 | 591 | g-ACTGCCTACCACTG-GTTTTAGAGCTA- |
| | | CCGACGTCTACGGACGGGAGCTA- |
| | | TTTTTTTTcagccaactccaaTTTTTTTT- |
| | | TAGCTCCCGTCCGTAGACGTCGG |
| RUNX2 | 592 | g-TGTATCACATTCTG-GTTTTAGAGCTA- |
| | | CCGACGTCTACGGACGGGAGCTA- |
| | | TTTTTTTTcagccaactccaaTTTTTTTT- |
| | | TAGCTCCCGTCCGTAGACGTCGG |
| RUNX2 | 593 | g-AAGAGGTAAGTCGT-GTTTTAGAGCTA- |
| | | CCGACGTCTACGGACGGGAGCTA- |
| | | TTTTTTTTcagccaactccaaTTTTTTTT- |
| | | TAGCTCCCGTCCGTAGACGTCGG |
| RUNX2 | 594 | -gcgcgcggcaatgc-GTTTTAGAGCTA- |
| | | CCGACGTCTACGGACGGGAGCTA- |
| | | TTTTTTTTcagccaactccaaTTTTTTTT- |
| | | TAGCTCCCGTCCGTAGACGTCGG |
| RUNX2 | 595 | g-AAGGAGCCTAGCCG-GTTTTAGAGCTA- |
| | | CCGACGTCTACGGACGGGAGCTA- |
| | | TTTTTTTTcagccaactccaaTTTTTTTT- |
| | | TAGCTCCCGTCCGTAGACGTCGG |
| RUNX2 | 596 | g-ACGCGGTGCCCCAA-GTTTTAGAGCTA- |
| | | CCGACGTCTACGGACGGGAGCTA- |
| | | TTTTTTTTcagccaactccaaTTTTTTTT- |
| | | TAGCTCCCGTCCGTAGACGTCGG |
| RUNX2 | 597 | g-CCTTACAGGAGTTT-GTTTTAGAGCTA- |
| | | CCAAAGCTCATTCGCGACTGAGC- |
| | | TTTTTTTTcagccaactccaaTTTTTTTT- |
| | | GCTCAGTCGCGAATGAGCTTTGG |
| RUNX2 | 598 | g-CACTATTACTGGAG-GTTTTAGAGCTA- |
| | | CCAAAGCTCATTCGCGACTGAGC- |
| | | TTTTTTTTcagccaactccaaTTTTTTTT- |
| | | GCTCAGTCGCGAATGAGCTTTGG |
| RUNX2 | 599 | g-ACTGCCTACCACTG-GTTTTAGAGCTA- |
| | | CCAAAGCTCATTCGCGACTGAGC- |
| | | TTTTTTTTcagccaactccaaTTTTTTTT- |
| | | GCTCAGTCGCGAATGAGCTTTGG |
| RUNX2 | 600 | g-TGTATCACATTCTG-GTTTTAGAGCTA- |
| | | CCAAAGCTCATTCGCGACTGAGC- |
| | | TTTTTTTTcagccaactccaaTTTTTTTT- |
| | | GCTCAGTCGCGAATGAGCTTTGG |
| RUNX2 | 601 | g-AAGAGGTAAGTCGT-GTTTTAGAGCTA- |
| | | CCAAAGCTCATTCGCGACTGAGC- |
| | | TTTTTTTTcagccaactccaaTTTTTTTT- |
| | | GCTCAGTCGCGAATGAGCTTTGG |
| RUNX2 | 602 | -gcgcgcggcaatgc-GTTTTAGAGCTA- |
| | | CCAAAGCTCATTCGCGACTGAGC- |
| | | TTTTTTTTcagccaactccaaTTTTTTTT- |
| | | GCTCAGTCGCGAATGAGCTTTGG |
| RUNX2 | 603 | g-AAGGAGCCTAGCCG-GTTTTAGAGCTA- |
| | | CCAAAGCTCATTCGCGACTGAGC- |
| | | TTTTTTTTcagccaactccaaTTTTTTTT- |
| | | GCTCAGTCGCGAATGAGCTTTGG |
| RUNX2 | 604 | g-ACGCGGTGCCCCAA-GTTTTAGAGCTA- |
| | | CCAAAGCTCATTCGCGACTGAGC- |
| | | TTTTTTTTcagccaactccaaTTTTTTTT- |
| | | GCTCAGTCGCGAATGAGCTTTGG |
| RUNX2 | 605 | g-CCTTACAGGAGTTT-GTTTTAGAGCTA- |
| | | CCATGGCACGATCGACACGGAGG- |
| | | TTTTTTTTcagccaactccaaTTTTTTTT- |
| | | CCTCCGTGTCGATCGTGCCATGG |
| RUNX2 | 606 | g-CACTATTACTGGAG-GTTTTAGAGCTA- |
| | | CCATGGCACGATCGACACGGAGG- |
| | | TTTTTTTTcagccaactccaaTTTTTTTT- |
| | | CCTCCGTGTCGATCGTGCCATGG |
| RUNX2 | 607 | g-ACTGCCTACCACTG-GTTTTAGAGCTA- |
| | | CCATGGCACGATCGACACGGAGG- |
| | | TTTTTTTTcagccaactccaaTTTTTTTT- |
| | | CCTCCGTGTCGATCGTGCCATGG |
| RUNX2 | 608 | g-TGTATCACATTCTG-GTTTTAGAGCTA- |
| | | CCATGGCACGATCGACACGGAGG- |
| | | TTTTTTTTcagccaactccaaTTTTTTTT- |
| | | CCTCCGTGTCGATCGTGCCATGG |
| RUNX2 | 609 | g-AAGAGGTAAGTCGT-GTTTTAGAGCTA- |
| | | CCATGGCACGATCGACACGGAGG- |
| | | TTTTTTTTcagccaactccaaTTTTTTTT- |
| | | CCTCCGTGTCGATCGTGCCATGG |
| RUNX2 | 610 | -gcgcgcggcaatgc-GTTTTAGAGCTA- |
| | | CCATGGCACGATCGACACGGAGG- |
| | | TTTTTTTTcagccaactccaaTTTTTTTT- |
| | | CCTCCGTGTCGATCGTGCCATGG |
| RUNX2 | 611 | g-AAGGAGCCTAGCCG-GTTTTAGAGCTA- |
| | | CCATGGCACGATCGACACGGAGG- |
| | | TTTTTTTTcagccaactccaaTTTTTTTT- |
| | | CCTCCGTGTCGATCGTGCCATGG |
| RUNX2 | 612 | g-ACGCGGTGCCCCAA-GTTTTAGAGCTA- |
| | | CCATGGCACGATCGACACGGAGG- |
| | | TTTTTTTTcagccaactccaaTTTTTTTT- |
| | | CCTCCGTGTCGATCGTGCCATGG |
| RUNX2 | 613 | g-CCTTACAGGAGTTT-GTTTTAGAGCTA- |
| | | CCCGAACTCTCTATCGAACGAGT- |
| | | TTTTTTTTcagccaactccaaTTTTTTTT- |
| | | ACTCGTTCGATAGAGAGTTCGGG |
| RUNX2 | 614 | g-CACTATTACTGGAG-GTTTTAGAGCTA- |
| | | CCCGAACTCTCTATCGAACGAGT- |
| | | TTTTTTTTcagccaactccaaTTTTTTTT- |
| | | ACTCGTTCGATAGAGAGTTCGGG |
| RUNX2 | 615 | g-ACTGCCTACCACTG-GTTTTAGAGCTA- |
| | | CCCGAACTCTCTATCGAACGAGT- |
| | | TTTTTTTTcagccaactccaaTTTTTTTT- |
| | | ACTCGTTCGATAGAGAGTTCGGG |
| RUNX2 | 616 | g-TGTATCACATTCTG-GTTTTAGAGCTA- |
| | | CCCGAACTCTCTATCGAACGAGT- |
| | | TTTTTTTTcagccaactccaaTTTTTTTT- |
| | | ACTCGTTCGATAGAGAGTTCGGG |
| RUNX2 | 617 | g-AAGAGGTAAGTCGT-GTTTTAGAGCTA- |
| | | CCCGAACTCTCTATCGAACGAGT- |
| | | TTTTTTTTcagccaactccaaTTTTTTTT- |
| | | ACTCGTTCGATAGAGAGTTCGGG |
| RUNX2 | 618 | -gcgcgcggcaatgc-GTTTTAGAGCTA- |
| | | CCCGAACTCTCTATCGAACGAGT- |
| | | TTTTTTTTcagccaactccaaTTTTTTTT- |
| | | ACTCGTTCGATAGAGAGTTCGGG |
| RUNX2 | 619 | g-AAGGAGCCTAGCCG-GTTTTAGAGCTA- |
| | | CCCGAACTCTCTATCGAACGAGT- |
| | | TTTTTTTTcagccaactccaaTTTTTTTT- |
| | | ACTCGTTCGATAGAGAGTTCGGG |
| RUNX2 | 620 | g-ACGCGGTGCCCCAA-GTTTTAGAGCTA- |
| | | CCCGAACTCTCTATCGAACGAGT- |
| | | TTTTTTTTcagccaactccaaTTTTTTTT- |
| | | ACTCGTTCGATAGAGAGTTCGGG |
| RUNX2 | 621 | g-CCTTACAGGAGTTT-GTTTTAGAGCTA- |
| | | CCTACACGATAGTGGTCGTGCGC- |
| | | TTTTTTTTcagccaactccaaTTTTTTTT- |
| | | GCGCACGACCACTATCGTGTAGG |
| RUNX2 | 622 | g-CACTATTACTGGAG-GTTTTAGAGCTA- |
| | | CCTACACGATAGTGGTCGTGCGC- |
| | | TTTTTTTTcagccaactccaaTTTTTTTT- |
| | | GCGCACGACCACTATCGTGTAGG |
| RUNX2 | 623 | g-ACTGCCTACCACTG-GTTTTAGAGCTA- |
| | | CCTACACGATAGTGGTCGTGCGC- |
| | | TTTTTTTTcagccaactccaaTTTTTTTT- |
| | | GCGCACGACCACTATCGTGTAGG |
| RUNX2 | 624 | g-TGTATCACATTCTG-GTTTTAGAGCTA- |
| | | CCTACACGATAGTGGTCGTGCGC- |
| | | TTTTTTTTcagccaactccaaTTTTTTTT- |
| | | GCGCACGACCACTATCGTGTAGG |
| RUNX2 | 625 | g-AAGAGGTAAGTCGT-GTTTTAGAGCTA- |
| | | CCTACACGATAGTGGTCGTGCGC- |
| | | TTTTTTTTcagccaactccaaTTTTTTTT- |
| | | GCGCACGACCACTATCGTGTAGG |
| RUNX2 | 626 | -gcgcgcggcaatgc-GTTTTAGAGCTA- |
| | | CCTACACGATAGTGGTCGTGCGC- |
| | | TTTTTTTTcagccaactccaaTTTTTTTT- |
| | | GCGCACGACCACTATCGTGTAGG |
| RUNX2 | 627 | g-AAGGAGCCTAGCCG-GTTTTAGAGCTA- |
| | | CCTACACGATAGTGGTCGTGCGC- |
| | | TTTTTTTTcagccaactccaaTTTTTTTT- |
| | | GCGCACGACCACTATCGTGTAGG |
| RUNX2 | 628 | g-ACGCGGTGCCCCAA-GTTTTAGAGCTA- |
| | | CCTACACGATAGTGGTCGTGCGC- |
| | | TTTTTTTTcagccaactccaaTTTTTTTT- |
| | | GCGCACGACCACTATCGTGTAGG |
| RUNX2 | 629 | g-CCTTACAGGAGTTT-GTTTTAGAGCTA- |
| | | CCCTGGCGGAACGTTCGAGTAAT- |
| | | TTTTTTTTcagccaactccaaTTTTTTTT- |
| | | ATTACTCGAACGTTCCGCCAGGG |
| RUNX2 | 630 | g-CACTATTACTGGAG-GTTTTAGAGCTA- |
| | | CCCTGGCGGAACGTTCGAGTAAT- |
| | | TTTTTTTTcagccaactccaaTTTTTTTT- |
| | | ATTACTCGAACGTTCCGCCAGGG |
| RUNX2 | 631 | g-ACTGCCTACCACTG-GTTTTAGAGCTA- |
| | | CCCTGGCGGAACGTTCGAGTAAT- |
| | | TTTTTTTTcagccaactccaaTTTTTTTT- |
| | | ATTACTCGAACGTTCCGCCAGGG |
| RUNX2 | 632 | g-TGTATCACATTCTG-GTTTTAGAGCTA- |
| | | CCCTGGCGGAACGTTCGAGTAAT- |
| | | TTTTTTTTcagccaactccaaTTTTTTTT- |
| | | ATTACTCGAACGTTCCGCCAGGG |
| RUNX2 | 633 | g-AAGAGGTAAGTCGT-GTTTTAGAGCTA- |
| | | CCCTGGCGGAACGTTCGAGTAAT- |
| | | TTTTTTTTcagccaactccaaTTTTTTTT- |
| | | ATTACTCGAACGTTCCGCCAGGG |
| RUNX2 | 634 | -gcgcgcggcaatgc-GTTTTAGAGCTA- |
| | | CCCTGGCGGAACGTTCGAGTAAT- |
| | | TTTTTTTTcagccaactccaaTTTTTTTT- |
| | | ATTACTCGAACGTTCCGCCAGGG |
| RUNX2 | 635 | g-AAGGAGCCTAGCCG-GTTTTAGAGCTA- |
| | | CCCTGGCGGAACGTTCGAGTAAT- |
| | | TTTTTTTTcagccaactccaaTTTTTTTT- |
| | | ATTACTCGAACGTTCCGCCAGGG |
| RUNX2 | 636 | g-ACGCGGTGCCCCAA-GTTTTAGAGCTA- |
| | | CCCTGGCGGAACGTTCGAGTAAT- |
| | | TTTTTTTTcagccaactccaaTTTTTTTT- |
| | | ATTACTCGAACGTTCCGCCAGGG |
| RUNX2 | 637 | g-CCTTACAGGAGTTT-GTTTTAGAGCTA- |
| | | CCTACACTCGACATCGGTAGCTA- |
| | | TTTTTTTTcagccaactccaaTTTTTTTT- |
| | | TAGCTACCGATGTCGAGTGTAGG |
| RUNX2 | 638 | g-CACTATTACTGGAG-GTTTTAGAGCTA- |
| | | CCTACACTCGACATCGGTAGCTA- |
| | | TTTTTTTTcagccaactccaaTTTTTTTT- |
| | | TAGCTACCGATGTCGAGTGTAGG |
| RUNX2 | 639 | g-ACTGCCTACCACTG-GTTTTAGAGCTA- |
| | | CCTACACTCGACATCGGTAGCTA- |
| | | TTTTTTTTcagccaactccaaTTTTTTTT- |
| | | TAGCTACCGATGTCGAGTGTAGG |
| RUNX2 | 640 | g-TGTATCACATTCTG-GTTTTAGAGCTA- |
| | | CCTACACTCGACATCGGTAGCTA- |
| | | TTTTTTTTcagccaactccaaTTTTTTTT- |
| | | TAGCTACCGATGTCGAGTGTAGG |
| RUNX2 | 641 | g-AAGAGGTAAGTCGT-GTTTTAGAGCTA- |
| | | CCTACACTCGACATCGGTAGCTA- |
| | | TTTTTTTTcagccaactccaaTTTTTTTT- |
| | | TAGCTACCGATGTCGAGTGTAGG |
| RUNX2 | 642 | -gcgcgcggcaatgc-GTTTTAGAGCTA- |
| | | CCTACACTCGACATCGGTAGCTA- |
| | | TTTTTTTTcagccaactccaaTTTTTTTT- |
| | | TAGCTACCGATGTCGAGTGTAGG |
| RUNX2 | 643 | g-AAGGAGCCTAGCCG-GTTTTAGAGCTA- |
| | | CCTACACTCGACATCGGTAGCTA- |
| | | TTTTTTTTcagccaactccaaTTTTTTTT- |
| | | TAGCTACCGATGTCGAGTGTAGG |
| RUNX2 | 644 | g-ACGCGGTGCCCCAA-GTTTTAGAGCTA- |
| | | CCTACACTCGACATCGGTAGCTA- |
| | | TTTTTTTTcagccaactccaaTTTTTTTT- |
| | | TAGCTACCGATGTCGAGTGTAGG |
| SOX5 | 645 | g-TAACCACACAATGA-GTTTTAGAGCTA- |
| | | CCGTCGTTGTACCGTCTACTTGAC- |
| | | TTTTTTTTcagccaactccaaTTTTTTTT- |
| | | GTCAAGTAGACGGTACAACGACGG |
| SOX5 | 646 | g-ACTCTCTTGTATTC-GTTTTAGAGCTA- |
| | | CCGTCGTTGTACCGTCTACTTGAC- |
| | | TTTTTTTTcagccaactccaaTTTTTTTT- |
| | | GTCAAGTAGACGGTACAACGACGG |
| SOX5 | 647 | g-AACAATGGCCAAGC-GTTTTAGAGCTA- |
| | | CCGTCGTTGTACCGTCTACTTGAC- |
| | | TTTTTTTTcagccaactccaaTTTTTTTT- |
| | | GTCAAGTAGACGGTACAACGACGG |
| SOX5 | 648 | g-TTCTGTCTTCAATA-GTTTTAGAGCTA- |
| | | CCGTCGTTGTACCGTCTACTTGAC- |
| | | TTTTTTTTcagccaactccaaTTTTTTTT- |
| | | GTCAAGTAGACGGTACAACGACGG |
| SOX5 | 649 | g-CTCTAGACAACCTC-GTTTTAGAGCTA- |
| | | CCGTCGTTGTACCGTCTACTTGAC- |
| | | TTTTTTTTcagccaactccaaTTTTTTTT- |
| | | GTCAAGTAGACGGTACAACGACGG |
| SOX5 | 650 | -GACAAGTTGTTTAC-GTTTTAGAGCTA- |
| | | CCGTCGTTGTACCGTCTACTTGAC- |
| | | TTTTTTTTcagccaactccaaTTTTTTTT- |
| | | GTCAAGTAGACGGTACAACGACGG |
| SOX5 | 651 | g-AGAGAGCCTAGAAA-GTTTTAGAGCTA- |
| | | CCGTCGTTGTACCGTCTACTTGAC- |
| | | TTTTTTTTcagccaactccaaTTTTTTTT- |
| | | GTCAAGTAGACGGTACAACGACGG |
| SOX5 | 652 | -GGTCAAGGAGTCCT-GTTTTAGAGCTA- |
| | | CCGTCGTTGTACCGTCTACTTGAC- |
| | | TTTTTTTTcagccaactccaaTTTTTTTT- |
| | | GTCAAGTAGACGGTACAACGACGG |
| SOX5 | 653 | g-TTGAGAGCAACACG-GTTTTAGAGCTA- |
| | | CCGTCGTTGTACCGTCTACTTGAC- |
| | | TTTTTTTTcagccaactccaaTTTTTTTT- |
| | | GTCAAGTAGACGGTACAACGACGG |
| SOX5 | 654 | g-TCATGACCAGCAAA-GTTTTAGAGCTA- |
| | | CCGTCGTTGTACCGTCTACTTGAC- |
| | | TTTTTTTTcagccaactccaaTTTTTTTT- |
| | | GTCAAGTAGACGGTACAACGACGG |
| SOX5 | 655 | g-CGGTCACCGCGGCC-GTTTTAGAGCTA- |
| | | CCGTCGTTGTACCGTCTACTTGAC- |
| | | TTTTTTTTcagccaactccaaTTTTTTTT- |
| | | GTCAAGTAGACGGTACAACGACGG |
| SOX5 | 656 | -GTGCAAATAACAAA-GTTTTAGAGCTA- |
| | | CCGTCGTTGTACCGTCTACTTGAC- |
| | | TTTTTTTTcagccaactccaaTTTTTTTT- |
| | | GTCAAGTAGACGGTACAACGACGG |
| SOX5 | 657 | g-TAACCACACAATGA-GTTTTAGAGCTA- |
| | | CCTTCCCGACTTCCGTAGGAGCGC- |
| | | TTTTTTTTcagccaactccaaTTTTTTTT- |
| | | GCGCTCCTACGGAAGTCGGGAAGG |
| SOX5 | 658 | g-ACTCTCTTGTATTC-GTTTTAGAGCTA- |
| | | CCTTCCCGACTTCCGTAGGAGCGC- |
| | | TTTTTTTTcagccaactccaaTTTTTTTT- |
| | | GCGCTCCTACGGAAGTCGGGAAGG |
| SOX5 | 659 | g-AACAATGGCCAAGC-GTTTTAGAGCTA- |
| | | CCTTCCCGACTTCCGTAGGAGCGC- |
| | | TTTTTTTTcagccaactccaaTTTTTTTT- |
| | | GCGCTCCTACGGAAGTCGGGAAGG |
| SOX5 | 660 | g-TTCTGTCTTCAATA-GTTTTAGAGCTA- |
| | | CCTTCCCGACTTCCGTAGGAGCGC- |
| | | TTTTTTTTcagccaactccaaTTTTTTTT- |
| | | GCGCTCCTACGGAAGTCGGGAAGG |
| SOX5 | 661 | g-CTCTAGACAACCTC-GTTTTAGAGCTA- |
| | | CCTTCCCGACTTCCGTAGGAGCGC- |
| | | TTTTTTTTcagccaactccaaTTTTTTTT- |
| | | GCGCTCCTACGGAAGTCGGGAAGG |
| SOX5 | 662 | -GACAAGTTGTTTAC-GTTTTAGAGCTA- |
| | | CCTTCCCGACTTCCGTAGGAGCGC- |
| | | TTTTTTTTcagccaactccaaTTTTTTTT- |
| | | GCGCTCCTACGGAAGTCGGGAAGG |
| SOX5 | 663 | g-AGAGAGCCTAGAAA-GTTTTAGAGCTA- |
| | | CCTTCCCGACTTCCGTAGGAGCGC- |
| | | TTTTTTTTcagccaactccaaTTTTTTTT- |
| | | GCGCTCCTACGGAAGTCGGGAAGG |
| SOX5 | 664 | -GGTCAAGGAGTCCT-GTTTTAGAGCTA- |
| | | CCTTCCCGACTTCCGTAGGAGCGC- |
| | | TTTTTTTTcagccaactccaaTTTTTTTT- |
| | | GCGCTCCTACGGAAGTCGGGAAGG |
| SOX5 | 665 | g-TTGAGAGCAACACG-GTTTTAGAGCTA- |
| | | CCTTCCCGACTTCCGTAGGAGCGC- |
| | | TTTTTTTTcagccaactccaaTTTTTTTT- |
| | | GCGCTCCTACGGAAGTCGGGAAGG |
| SOX5 | 666 | g-TCATGACCAGCAAA-GTTTTAGAGCTA- |
| | | CCTTCCCGACTTCCGTAGGAGCGC- |
| | | TTTTTTTTcagccaactccaaTTTTTTTT- |
| | | GCGCTCCTACGGAAGTCGGGAAGG |
| SOX5 | 667 | g-CGGTCACCGCGGCC-GTTTTAGAGCTA- |
| | | CCTTCCCGACTTCCGTAGGAGCGC- |
| | | TTTTTTTTcagccaactccaaTTTTTTTT- |
| | | GCGCTCCTACGGAAGTCGGGAAGG |
| SOX5 | 668 | -GTGCAAATAACAAA-GTTTTAGAGCTA- |
| | | CCTTCCCGACTTCCGTAGGAGCGC- |
| | | TTTTTTTTcagccaactccaaTTTTTTTT- |
| | | GCGCTCCTACGGAAGTCGGGAAGG |
| SOX5 | 669 | g-TAACCACACAATGA-GTTTTAGAGCTA- |
| | | CCTGAAGGTAAAGATCGGGTCCTC- |
| | | TTTTTTTTcagccaactccaaTTTTTTTT- |
| | | GAGGACCCGATCTTTACCTTCAGG |
| SOX5 | 670 | g-ACTCTCTTGTATTC-GTTTTAGAGCTA- |
| | | CCTGAAGGTAAAGATCGGGTCCTC- |
| | | TTTTTTTTcagccaactccaaTTTTTTTT- |
| | | GAGGACCCGATCTTTACCTTCAGG |
| SOX5 | 671 | g-AACAATGGCCAAGC-GTTTTAGAGCTA- |
| | | CCTGAAGGTAAAGATCGGGTCCTC- |
| | | TTTTTTTTcagccaactccaaTTTTTTTT- |
| | | GAGGACCCGATCTTTACCTTCAGG |
| SOX5 | 672 | g-TTCTGTCTTCAATA-GTTTTAGAGCTA- |
| | | CCTGAAGGTAAAGATCGGGTCCTC- |
| | | TTTTTTTTcagccaactccaaTTTTTTTT- |
| | | GAGGACCCGATCTTTACCTTCAGG |
| SOX5 | 673 | g-CTCTAGACAACCTC-GTTTTAGAGCTA- |
| | | CCTGAAGGTAAAGATCGGGTCCTC- |
| | | TTTTTTTTcagccaactccaaTTTTTTTT- |
| | | GAGGACCCGATCTTTACCTTCAGG |
| SOX5 | 674 | -GACAAGTTGTTTAC-GTTTTAGAGCTA- |
| | | CCTGAAGGTAAAGATCGGGTCCTC- |
| | | TTTTTTTTcagccaactccaaTTTTTTTT- |
| | | GAGGACCCGATCTTTACCTTCAGG |
| SOX5 | 675 | g-AGAGAGCCTAGAAA-GTTTTAGAGCTA- |
| | | CCTGAAGGTAAAGATCGGGTCCTC- |
| | | TTTTTTTTcagccaactccaaTTTTTTTT- |
| | | GAGGACCCGATCTTTACCTTCAGG |
| SOX5 | 676 | -GGTCAAGGAGTCCT-GTTTTAGAGCTA- |
| | | CCTGAAGGTAAAGATCGGGTCCTC- |
| | | TTTTTTTTcagccaactccaaTTTTTTTT- |
| | | GAGGACCCGATCTTTACCTTCAGG |
| SOX5 | 677 | g-TTGAGAGCAACACG-GTTTTAGAGCTA- |
| | | CCTGAAGGTAAAGATCGGGTCCTC- |
| | | TTTTTTTTcagccaactccaaTTTTTTTT- |
| | | GAGGACCCGATCTTTACCTTCAGG |
| SOX5 | 678 | g-TCATGACCAGCAAA-GTTTTAGAGCTA- |
| | | CCTGAAGGTAAAGATCGGGTCCTC- |
| | | TTTTTTTTcagccaactccaaTTTTTTTT- |
| | | GAGGACCCGATCTTTACCTTCAGG |
| SOX5 | 679 | g-CGGTCACCGCGGCC-GTTTTAGAGCTA- |
| | | CCTGAAGGTAAAGATCGGGTCCTC- |
| | | TTTTTTTTcagccaactccaaTTTTTTTT- |
| | | GAGGACCCGATCTTTACCTTCAGG |
| SOX5 | 680 | -GTGCAAATAACAAA-GTTTTAGAGCTA- |
| | | CCTGAAGGTAAAGATCGGGTCCTC- |
| | | TTTTTTTTcagccaactccaaTTTTTTTT- |
| | | GAGGACCCGATCTTTACCTTCAGG |
| SOX5 | 681 | g-TAACCACACAATGA-GTTTTAGAGCTA- |
| | | CCTGGTTATAGCGGACGCACTGT- |
| | | TTTTTTTTcagccaactccaaTTTTTTTT- |
| | | ACAGTGCGTCCGCTATAACCAGG |
| SOX5 | 682 | g-ACTCTCTTGTATTC-GTTTTAGAGCTA- |
| | | CCTGGTTATAGCGGACGCACTGT- |
| | | TTTTTTTTcagccaactccaaTTTTTTTT- |
| | | ACAGTGCGTCCGCTATAACCAGG |
| SOX5 | 683 | g-AACAATGGCCAAGC-GTTTTAGAGCTA- |
| | | CCTGGTTATAGCGGACGCACTGT- |
| | | TTTTTTTTcagccaactccaaTTTTTTTT- |
| | | ACAGTGCGTCCGCTATAACCAGG |
| SOX5 | 684 | g-TTCTGTCTTCAATA-GTTTTAGAGCTA- |
| | | CCTGGTTATAGCGGACGCACTGT- |
| | | TTTTTTTTcagccaactccaaTTTTTTTT- |
| | | ACAGTGCGTCCGCTATAACCAGG |
| SOX5 | 685 | g-CTCTAGACAACCTC-GTTTTAGAGCTA- |
| | | CCTGGTTATAGCGGACGCACTGT- |
| | | TTTTTTTTcagccaactccaaTTTTTTTT- |
| | | ACAGTGCGTCCGCTATAACCAGG |
| SOX5 | 686 | -GACAAGTTGTTTAC-GTTTTAGAGCTA- |
| | | CCTGGTTATAGCGGACGCACTGT- |
| | | TTTTTTTTcagccaactccaaTTTTTTTT- |
| | | ACAGTGCGTCCGCTATAACCAGG |
| SOX5 | 687 | g-AGAGAGCCTAGAAA-GTTTTAGAGCTA- |
| | | CCTGGTTATAGCGGACGCACTGT- |
| | | TTTTTTTTcagccaactccaaTTTTTTTT- |
| | | ACAGTGCGTCCGCTATAACCAGG |
| SOX5 | 688 | -GGTCAAGGAGTCCT-GTTTTAGAGCTA- |
| | | CCTGGTTATAGCGGACGCACTGT- |
| | | TTTTTTTTcagccaactccaaTTTTTTTT- |
| | | ACAGTGCGTCCGCTATAACCAGG |
| SOX5 | 689 | g-TTGAGAGCAACACG-GTTTTAGAGCTA- |
| | | CCTGGTTATAGCGGACGCACTGT- |
| | | TTTTTTTTcagccaactccaaTTTTTTTT- |
| | | ACAGTGCGTCCGCTATAACCAGG |
| SOX5 | 690 | g-TCATGACCAGCAAA-GTTTTAGAGCTA- |
| | | CCTGGTTATAGCGGACGCACTGT- |
| | | TTTTTTTTcagccaactccaaTTTTTTTT- |
| | | ACAGTGCGTCCGCTATAACCAGG |
| SOX5 | 691 | g-CGGTCACCGCGGCC-GTTTTAGAGCTA- |
| | | CCTGGTTATAGCGGACGCACTGT- |
| | | TTTTTTTTcagccaactccaaTTTTTTTT- |
| | | ACAGTGCGTCCGCTATAACCAGG |
| SOX5 | 692 | -GTGCAAATAACAAA-GTTTTAGAGCTA- |
| | | CCTGGTTATAGCGGACGCACTGT- |
| | | TTTTTTTTcagccaactccaaTTTTTTTT- |
| | | ACAGTGCGTCCGCTATAACCAGG |
| SOX5 | 693 | g-TAACCACACAATGA-GTTTTAGAGCTA- |
| | | CCGCATCGTATTATCTGCGAAGC- |
| | | TTTTTTTTcagccaactccaaTTTTTTTT- |
| | | GCTTCGCAGATAATACGATGCGG |
| SOX5 | 694 | g-ACTCTCTTGTATTC-GTTTTAGAGCTA- |
| | | CCGCATCGTATTATCTGCGAAGC- |
| | | TTTTTTTTcagccaactccaaTTTTTTTT- |
| | | GCTTCGCAGATAATACGATGCGG |
| SOX5 | 695 | g-AACAATGGCCAAGC-GTTTTAGAGCTA- |
| | | CCGCATCGTATTATCTGCGAAGC- |
| | | TTTTTTTTcagccaactccaaTTTTTTTT- |
| | | GCTTCGCAGATAATACGATGCGG |
| SOX5 | 696 | g-TTCTGTCTTCAATA-GTTTTAGAGCTA- |
| | | CCGCATCGTATTATCTGCGAAGC- |
| | | TTTTTTTTcagccaactccaaTTTTTTTT- |
| | | GCTTCGCAGATAATACGATGCGG |
| SOX5 | 697 | g-CTCTAGACAACCTC-GTTTTAGAGCTA- |
| | | CCGCATCGTATTATCTGCGAAGC- |
| | | TTTTTTTTcagccaactccaaTTTTTTTT- |
| | | GCTTCGCAGATAATACGATGCGG |
| SOX5 | 698 | -GACAAGTTGTTTAC-GTTTTAGAGCTA- |
| | | CCGCATCGTATTATCTGCGAAGC- |
| | | TTTTTTTTcagccaactccaaTTTTTTTT- |
| | | GCTTCGCAGATAATACGATGCGG |
| SOX5 | 699 | g-AGAGAGCCTAGAAA-GTTTTAGAGCTA- |
| | | CCGCATCGTATTATCTGCGAAGC- |
| | | TTTTTTTTcagccaactccaaTTTTTTTT- |
| | | GCTTCGCAGATAATACGATGCGG |
| SOX5 | 700 | -GGTCAAGGAGTCCT-GTTTTAGAGCTA- |
| | | CCGCATCGTATTATCTGCGAAGC- |
| | | TTTTTTTTcagccaactccaaTTTTTTTT- |
| | | GCTTCGCAGATAATACGATGCGG |
| SOX5 | 701 | g-TTGAGAGCAACACG-GTTTTAGAGCTA- |
| | | CCGCATCGTATTATCTGCGAAGC- |
| | | TTTTTTTTcagccaactccaaTTTTTTTT- |
| | | GCTTCGCAGATAATACGATGCGG |
| SOX5 | 702 | g-TCATGACCAGCAAA-GTTTTAGAGCTA- |
| | | CCGCATCGTATTATCTGCGAAGC- |
| | | TTTTTTTTcagccaactccaaTTTTTTTT- |
| | | GCTTCGCAGATAATACGATGCGG |
| SOX5 | 703 | g-CGGTCACCGCGGCC-GTTTTAGAGCTA- |
| | | CCGCATCGTATTATCTGCGAAGC- |
| | | TTTTTTTTcagccaactccaaTTTTTTTT- |
| | | GCTTCGCAGATAATACGATGCGG |
| SOX5 | 704 | -GTGCAAATAACAAA-GTTTTAGAGCTA- |
| | | CCGCATCGTATTATCTGCGAAGC- |
| | | TTTTTTTTcagccaactccaaTTTTTTTT- |
| | | GCTTCGCAGATAATACGATGCGG |
| SOX5 | 705 | g-TAACCACACAATGA-GTTTTAGAGCTA- |
| | | CCGCTAGGACGTTCAACGGAGTC- |
| | | TTTTTTTTcagccaactccaaTTTTTTTT- |
| | | GACTCCGTTGAACGTCCTAGCGG |
| SOX5 | 706 | g-ACTCTCTTGTATTC-GTTTTAGAGCTA- |
| | | CCGCTAGGACGTTCAACGGAGTC- |
| | | TTTTTTTTcagccaactccaaTTTTTTTT- |
| | | GACTCCGTTGAACGTCCTAGCGG |
| SOX5 | 707 | g-AACAATGGCCAAGC-GTTTTAGAGCTA- |
| | | CCGCTAGGACGTTCAACGGAGTC- |
| | | TTTTTTTTcagccaactccaaTTTTTTTT- |
| | | GACTCCGTTGAACGTCCTAGCGG |
| SOX5 | 708 | g-TTCTGTCTTCAATA-GTTTTAGAGCTA- |
| | | CCGCTAGGACGTTCAACGGAGTC- |
| | | TTTTTTTTcagccaactccaaTTTTTTTT- |
| | | GACTCCGTTGAACGTCCTAGCGG |
| SOX5 | 709 | g-CTCTAGACAACCTC-GTTTTAGAGCTA- |
| | | CCGCTAGGACGTTCAACGGAGTC- |
| | | TTTTTTTTcagccaactccaaTTTTTTTT- |
| | | GACTCCGTTGAACGTCCTAGCGG |
| SOX5 | 710 | -GACAAGTTGTTTAC-GTTTTAGAGCTA- |
| | | CCGCTAGGACGTTCAACGGAGTC- |
| | | TTTTTTTTcagccaactccaaTTTTTTTT- |
| | | GACTCCGTTGAACGTCCTAGCGG |
| SOX5 | 711 | g-AGAGAGCCTAGAAA-GTTTTAGAGCTA- |
| | | CCGCTAGGACGTTCAACGGAGTC- |
| | | TTTTTTTTcagccaactccaaTTTTTTTT- |
| | | GACTCCGTTGAACGTCCTAGCGG |
| SOX5 | 712 | -GGTCAAGGAGTCCT-GTTTTAGAGCTA- |
| | | CCGCTAGGACGTTCAACGGAGTC- |
| | | TTTTTTTTcagccaactccaaTTTTTTTT- |
| | | GACTCCGTTGAACGTCCTAGCGG |
| SOX5 | 713 | g-TTGAGAGCAACACG-GTTTTAGAGCTA- |
| | | CCGCTAGGACGTTCAACGGAGTC- |
| | | TTTTTTTTcagccaactccaaTTTTTTTT- |
| | | GACTCCGTTGAACGTCCTAGCGG |
| SOX5 | 714 | g-TCATGACCAGCAAA-GTTTTAGAGCTA- |
| | | CCGCTAGGACGTTCAACGGAGTC- |
| | | TTTTTTTTcagccaactccaaTTTTTTTT- |
| | | GACTCCGTTGAACGTCCTAGCGG |
| SOX5 | 715 | g-CGGTCACCGCGGCC-GTTTTAGAGCTA- |
| | | CCGCTAGGACGTTCAACGGAGTC- |
| | | TTTTTTTTcagccaactccaaTTTTTTTT- |
| | | GACTCCGTTGAACGTCCTAGCGG |
| SOX5 | 716 | -GTGCAAATAACAAA-GTTTTAGAGCTA- |
| | | CCGCTAGGACGTTCAACGGAGTC- |
| | | TTTTTTTTcagccaactccaaTTTTTTTT- |
| | | GACTCCGTTGAACGTCCTAGCGG |
| SOX5 | 717 | g-TAACCACACAATGA-GTTTTAGAGCTA- |
| | | CCATAGCGGTACTATCGGCATCT- |
| | | TTTTTTTTcagccaactccaaTTTTTTTT- |
| | | AGATGCCGATAGTACCGCTATGG |
| SOX5 | 718 | g-ACTCTCTTGTATTC-GTTTTAGAGCTA- |
| | | CCATAGCGGTACTATCGGCATCT- |
| | | TTTTTTTTcagccaactccaaTTTTTTTT- |
| | | AGATGCCGATAGTACCGCTATGG |
| SOX5 | 719 | g-AACAATGGCCAAGC-GTTTTAGAGCTA- |
| | | CCATAGCGGTACTATCGGCATCT- |
| | | TTTTTTTTcagccaactccaaTTTTTTTT- |
| | | AGATGCCGATAGTACCGCTATGG |
| SOX5 | 720 | g-TTCTGTCTTCAATA-GTTTTAGAGCTA- |
| | | CCATAGCGGTACTATCGGCATCT- |
| | | TTTTTTTTcagccaactccaaTTTTTTTT- |
| | | AGATGCCGATAGTACCGCTATGG |
| SOX5 | 721 | g-CTCTAGACAACCTC-GTTTTAGAGCTA- |
| | | CCATAGCGGTACTATCGGCATCT- |
| | | TTTTTTTTcagccaactccaaTTTTTTTT- |
| | | AGATGCCGATAGTACCGCTATGG |
| SOX5 | 722 | -GACAAGTTGTTTAC-GTTTTAGAGCTA- |
| | | CCATAGCGGTACTATCGGCATCT- |
| | | TTTTTTTTcagccaactccaaTTTTTTTT- |
| | | AGATGCCGATAGTACCGCTATGG |
| SOX5 | 723 | g-AGAGAGCCTAGAAA-GTTTTAGAGCTA- |
| | | CCATAGCGGTACTATCGGCATCT- |
| | | TTTTTTTTcagccaactccaaTTTTTTTT- |
| | | AGATGCCGATAGTACCGCTATGG |
| SOX5 | 724 | -GGTCAAGGAGTCCT-GTTTTAGAGCTA- |
| | | CCATAGCGGTACTATCGGCATCT- |
| | | TTTTTTTTcagccaactccaaTTTTTTTT- |
| | | AGATGCCGATAGTACCGCTATGG |
| SOX5 | 725 | g-TTGAGAGCAACACG-GTTTTAGAGCTA- |
| | | CCATAGCGGTACTATCGGCATCT- |
| | | TTTTTTTTcagccaactccaaTTTTTTTT- |
| | | AGATGCCGATAGTACCGCTATGG |
| SOX5 | 726 | g-TCATGACCAGCAAA-GTTTTAGAGCTA- |
| | | CCATAGCGGTACTATCGGCATCT- |
| | | TTTTTTTTcagccaactccaaTTTTTTTT- |
| | | AGATGCCGATAGTACCGCTATGG |
| SOX5 | 727 | g-CGGTCACCGCGGCC-GTTTTAGAGCTA- |
| | | CCATAGCGGTACTATCGGCATCT- |
| | | TTTTTTTTcagccaactccaaTTTTTTTT- |
| | | AGATGCCGATAGTACCGCTATGG |
| SOX5 | 728 | -GTGCAAATAACAAA-GTTTTAGAGCTA- |
| | | CCATAGCGGTACTATCGGCATCT- |
| | | TTTTTTTTcagccaactccaaTTTTTTTT- |
| | | AGATGCCGATAGTACCGCTATGG |
| SOX5 | 729 | g-TAACCACACAATGA-GTTTTAGAGCTA- |
| | | CCTCGTACTAGTCTCGCATGACC- |
| | | TTTTTTTTcagccaactccaaTTTTTTTT- |
| | | GGTCATGCGAGACTAGTACGAGG |
| SOX5 | 730 | g-ACTCTCTTGTATTC-GTTTTAGAGCTA- |
| | | CCTCGTACTAGTCTCGCATGACC- |
| | | TTTTTTTTcagccaactccaaTTTTTTTT- |
| | | GGTCATGCGAGACTAGTACGAGG |
| SOX5 | 731 | g-AACAATGGCCAAGC-GTTTTAGAGCTA- |
| | | CCTCGTACTAGTCTCGCATGACC- |
| | | TTTTTTTTcagccaactccaaTTTTTTTT- |
| | | GGTCATGCGAGACTAGTACGAGG |
| SOX5 | 732 | g-TTCTGTCTTCAATA-GTTTTAGAGCTA- |
| | | CCTCGTACTAGTCTCGCATGACC- |
| | | TTTTTTTTcagccaactccaaTTTTTTTT- |
| | | GGTCATGCGAGACTAGTACGAGG |
| SOX5 | 733 | g-CTCTAGACAACCTC-GTTTTAGAGCTA- |
| | | CCTCGTACTAGTCTCGCATGACC- |
| | | TTTTTTTTcagccaactccaaTTTTTTTT- |
| | | GGTCATGCGAGACTAGTACGAGG |
| SOX5 | 734 | -GACAAGTTGTTTAC-GTTTTAGAGCTA- |
| | | CCTCGTACTAGTCTCGCATGACC- |
| | | TTTTTTTTcagccaactccaaTTTTTTTT- |
| | | GGTCATGCGAGACTAGTACGAGG |
| SOX5 | 735 | g-AGAGAGCCTAGAAA-GTTTTAGAGCTA- |
| | | CCTCGTACTAGTCTCGCATGACC- |
| | | TTTTTTTTcagccaactccaaTTTTTTTT- |
| | | GGTCATGCGAGACTAGTACGAGG |
| SOX5 | 736 | -GGTCAAGGAGTCCT-GTTTTAGAGCTA- |
| | | CCTCGTACTAGTCTCGCATGACC- |
| | | TTTTTTTTcagccaactccaaTTTTTTTT- |
| | | GGTCATGCGAGACTAGTACGAGG |
| SOX5 | 737 | g-TTGAGAGCAACACG-GTTTTAGAGCTA- |
| | | CCTCGTACTAGTCTCGCATGACC- |
| | | TTTTTTTTcagccaactccaaTTTTTTTT- |
| | | GGTCATGCGAGACTAGTACGAGG |
| SOX5 | 738 | g-TCATGACCAGCAAA-GTTTTAGAGCTA- |
| | | CCTCGTACTAGTCTCGCATGACC- |
| | | TTTTTTTTcagccaactccaaTTTTTTTT- |
| | | GGTCATGCGAGACTAGTACGAGG |
| SOX5 | 739 | g-CGGTCACCGCGGCC-GTTTTAGAGCTA- |
| | | CCTCGTACTAGTCTCGCATGACC- |
| | | TTTTTTTTcagccaactccaaTTTTTTTT- |
| | | GGTCATGCGAGACTAGTACGAGG |
| SOX5 | 740 | -GTGCAAATAACAAA-GTTTTAGAGCTA- |
| | | CCTCGTACTAGTCTCGCATGACC- |
| | | TTTTTTTTcagccaactccaaTTTTTTTT- |
| | | GGTCATGCGAGACTAGTACGAGG |
| SOX5 | 741 | g-TAACCACACAATGA-GTTTTAGAGCTA- |
| | | CCGATAGTGCTAAACGACGCTTT- |
| | | TTTTTTTTcagccaactccaaTTTTTTTT- |
| | | AAAGCGTCGTTTAGCACTATCGG |
| SOX5 | 742 | g-ACTCTCTTGTATTC-GTTTTAGAGCTA- |
| | | CCGATAGTGCTAAACGACGCTTT- |
| | | TTTTTTTTcagccaactccaaTTTTTTTT- |
| | | AAAGCGTCGTTTAGCACTATCGG |
| SOX5 | 743 | g-AACAATGGCCAAGC-GTTTTAGAGCTA- |
| | | CCGATAGTGCTAAACGACGCTTT- |
| | | TTTTTTTTcagccaactccaaTTTTTTTT- |
| | | AAAGCGTCGTTTAGCACTATCGG |
| SOX5 | 744 | g-TTCTGTCTTCAATA-GTTTTAGAGCTA- |
| | | CCGATAGTGCTAAACGACGCTTT- |
| | | TTTTTTTTcagccaactccaaTTTTTTTT- |
| | | AAAGCGTCGTTTAGCACTATCGG |
| SOX5 | 745 | g-CTCTAGACAACCTC-GTTTTAGAGCTA- |
| | | CCGATAGTGCTAAACGACGCTTT- |
| | | TTTTTTTTcagccaactccaaTTTTTTTT- |
| | | AAAGCGTCGTTTAGCACTATCGG |
| SOX5 | 746 | -GACAAGTTGTTTAC-GTTTTAGAGCTA- |
| | | CCGATAGTGCTAAACGACGCTTT- |
| | | TTTTTTTTcagccaactccaaTTTTTTTT- |
| | | AAAGCGTCGTTTAGCACTATCGG |
| SOX5 | 747 | g-AGAGAGCCTAGAAA-GTTTTAGAGCTA- |
| | | CCGATAGTGCTAAACGACGCTTT- |
| | | TTTTTTTTcagccaactccaaTTTTTTTT- |
| | | AAAGCGTCGTTTAGCACTATCGG |
| SOX5 | 748 | -GGTCAAGGAGTCCT-GTTTTAGAGCTA- |
| | | CCGATAGTGCTAAACGACGCTTT- |
| | | TTTTTTTTcagccaactccaaTTTTTTTT- |
| | | AAAGCGTCGTTTAGCACTATCGG |
| SOX5 | 749 | g-TTGAGAGCAACACG-GTTTTAGAGCTA- |
| | | CCGATAGTGCTAAACGACGCTTT- |
| | | TTTTTTTTcagccaactccaaTTTTTTTT- |
| | | AAAGCGTCGTTTAGCACTATCGG |
| SOX5 | 750 | g-TCATGACCAGCAAA-GTTTTAGAGCTA- |
| | | CCGATAGTGCTAAACGACGCTTT- |
| | | TTTTTTTTcagccaactccaaTTTTTTTT- |
| | | AAAGCGTCGTTTAGCACTATCGG |
| SOX5 | 751 | g-CGGTCACCGCGGCC-GTTTTAGAGCTA- |
| | | CCGATAGTGCTAAACGACGCTTT- |
| | | TTTTTTTTcagccaactccaaTTTTTTTT- |
| | | AAAGCGTCGTTTAGCACTATCGG |
| SOX5 | 752 | -GTGCAAATAACAAA-GTTTTAGAGCTA- |
| | | CCGATAGTGCTAAACGACGCTTT- |
| | | TTTTTTTTcagccaactccaaTTTTTTTT- |
| | | AAAGCGTCGTTTAGCACTATCGG |
| SOX5 | 753 | g-TAACCACACAATGA-GTTTTAGAGCTA- |
| | | CCCGTTATCGACGTTCAAGGAAC- |
| | | TTTTTTTTcagccaactccaaTTTTTTTT- |
| | | GTTCCTTGAACGTCGATAACGGG |
| SOX5 | 754 | g-ACTCTCTTGTATTC-GTTTTAGAGCTA- |
| | | CCCGTTATCGACGTTCAAGGAAC- |
| | | TTTTTTTTcagccaactccaaTTTTTTTT- |
| | | GTTCCTTGAACGTCGATAACGGG |
| SOX5 | 755 | g-AACAATGGCCAAGC-GTTTTAGAGCTA- |
| | | CCCGTTATCGACGTTCAAGGAAC- |
| | | TTTTTTTTcagccaactccaaTTTTTTTT- |
| | | GTTCCTTGAACGTCGATAACGGG |
| SOX5 | 756 | g-TTCTGTCTTCAATA-GTTTTAGAGCTA- |
| | | CCCGTTATCGACGTTCAAGGAAC- |
| | | TTTTTTTTcagccaactccaaTTTTTTTT- |
| | | GTTCCTTGAACGTCGATAACGGG |
| SOX5 | 757 | g-CTCTAGACAACCTC-GTTTTAGAGCTA- |
| | | CCCGTTATCGACGTTCAAGGAAC- |
| | | TTTTTTTTcagccaactccaaTTTTTTTT- |
| | | GTTCCTTGAACGTCGATAACGGG |
| SOX5 | 758 | -GACAAGTTGTTTAC-GTTTTAGAGCTA- |
| | | CCCGTTATCGACGTTCAAGGAAC- |
| | | TTTTTTTTcagccaactccaaTTTTTTTT- |
| | | GTTCCTTGAACGTCGATAACGGG |
| SOX5 | 759 | g-AGAGAGCCTAGAAA-GTTTTAGAGCTA- |
| | | CCCGTTATCGACGTTCAAGGAAC- |
| | | TTTTTTTTcagccaactccaaTTTTTTTT- |
| | | GTTCCTTGAACGTCGATAACGGG |
| SOX5 | 760 | -GGTCAAGGAGTCCT-GTTTTAGAGCTA- |
| | | CCCGTTATCGACGTTCAAGGAAC- |
| | | TTTTTTTTcagccaactccaaTTTTTTTT- |
| | | GTTCCTTGAACGTCGATAACGGG |
| SOX5 | 761 | g-TTGAGAGCAACACG-GTTTTAGAGCTA- |
| | | CCCGTTATCGACGTTCAAGGAAC- |
| | | TTTTTTTTcagccaactccaaTTTTTTTT- |
| | | GTTCCTTGAACGTCGATAACGGG |
| SOX5 | 762 | g-TCATGACCAGCAAA-GTTTTAGAGCTA- |
| | | CCCGTTATCGACGTTCAAGGAAC- |
| | | TTTTTTTTcagccaactccaaTTTTTTTT- |
| | | GTTCCTTGAACGTCGATAACGGG |
| SOX5 | 763 | g-CGGTCACCGCGGCC-GTTTTAGAGCTA- |
| | | CCCGTTATCGACGTTCAAGGAAC- |
| | | TTTTTTTTcagccaactccaaTTTTTTTT- |
| | | GTTCCTTGAACGTCGATAACGGG |
| SOX5 | 764 | -GTGCAAATAACAAA-GTTTTAGAGCTA- |
| | | CCCGTTATCGACGTTCAAGGAAC- |
| | | TTTTTTTTcagccaactccaaTTTTTTTT- |
| | | GTTCCTTGAACGTCGATAACGGG |
| SOX5 | 765 | g-TAACCACACAATGA-GTTTTAGAGCTA- |
| | | CCGATCAATGCGGTCTGCGTAAC- |
| | | TTTTTTTTcagccaactccaaTTTTTTTT- |
| | | GTTACGCAGACCGCATTGATCGG |
| SOX5 | 766 | g-ACTCTCTTGTATTC-GTTTTAGAGCTA- |
| | | CCGATCAATGCGGTCTGCGTAAC- |
| | | TTTTTTTTcagccaactccaaTTTTTTTT- |
| | | GTTACGCAGACCGCATTGATCGG |
| SOX5 | 767 | g-AACAATGGCCAAGC-GTTTTAGAGCTA- |
| | | CCGATCAATGCGGTCTGCGTAAC- |
| | | TTTTTTTTcagccaactccaaTTTTTTTT- |
| | | GTTACGCAGACCGCATTGATCGG |
| SOX5 | 768 | g-TTCTGTCTTCAATA-GTTTTAGAGCTA- |
| | | CCGATCAATGCGGTCTGCGTAAC- |
| | | TTTTTTTTcagccaactccaaTTTTTTTT- |
| | | GTTACGCAGACCGCATTGATCGG |
| SOX5 | 769 | g-CTCTAGACAACCTC-GTTTTAGAGCTA- |
| | | CCGATCAATGCGGTCTGCGTAAC- |
| | | TTTTTTTTcagccaactccaaTTTTTTTT- |
| | | GTTACGCAGACCGCATTGATCGG |
| SOX5 | 770 | -GACAAGTTGTTTAC-GTTTTAGAGCTA- |
| | | CCGATCAATGCGGTCTGCGTAAC- |
| | | TTTTTTTTcagccaactccaaTTTTTTTT- |
| | | GTTACGCAGACCGCATTGATCGG |
| SOX5 | 771 | g-AGAGAGCCTAGAAA-GTTTTAGAGCTA- |
| | | CCGATCAATGCGGTCTGCGTAAC- |
| | | TTTTTTTTcagccaactccaaTTTTTTTT- |
| | | GTTACGCAGACCGCATTGATCGG |
| SOX5 | 772 | -GGTCAAGGAGTCCT-GTTTTAGAGCTA- |
| | | CCGATCAATGCGGTCTGCGTAAC- |
| | | TTTTTTTTcagccaactccaaTTTTTTTT- |
| | | GTTACGCAGACCGCATTGATCGG |
| SOX5 | 773 | g-TTGAGAGCAACACG-GTTTTAGAGCTA- |
| | | CCGATCAATGCGGTCTGCGTAAC- |
| | | TTTTTTTTcagccaactccaaTTTTTTTT- |
| | | GTTACGCAGACCGCATTGATCGG |
| SOX5 | 774 | g-TCATGACCAGCAAA-GTTTTAGAGCTA- |
| | | CCGATCAATGCGGTCTGCGTAAC- |
| | | TTTTTTTTcagccaactccaaTTTTTTTT- |
| | | GTTACGCAGACCGCATTGATCGG |
| SOX5 | 775 | g-CGGTCACCGCGGCC-GTTTTAGAGCTA- |
| | | CCGATCAATGCGGTCTGCGTAAC- |
| | | TTTTTTTTcagccaactccaaTTTTTTTT- |
| | | GTTACGCAGACCGCATTGATCGG |
| SOX5 | 776 | -GTGCAAATAACAAA-GTTTTAGAGCTA- |
| | | CCGATCAATGCGGTCTGCGTAAC- |
| | | TTTTTTTTcagccaactccaaTTTTTTTT- |
| | | GTTACGCAGACCGCATTGATCGG |
| SOX5 | 777 | g-TAACCACACAATGA-GTTTTAGAGCTA- |
| | | CCCTTACTCGCGATACTCTCGAC- |
| | | TTTTTTTTcagccaactccaaTTTTTTTT- |
| | | GTCGAGAGTATCGCGAGTAAGGG |
| SOX5 | 778 | g-ACTCTCTTGTATTC-GTTTTAGAGCTA- |
| | | CCCTTACTCGCGATACTCTCGAC- |
| | | TTTTTTTTcagccaactccaaTTTTTTTT- |
| | | GTCGAGAGTATCGCGAGTAAGGG |
| SOX5 | 779 | g-AACAATGGCCAAGC-GTTTTAGAGCTA- |
| | | CCCTTACTCGCGATACTCTCGAC- |
| | | TTTTTTTTcagccaactccaaTTTTTTTT- |
| | | GTCGAGAGTATCGCGAGTAAGGG |
| SOX5 | 780 | g-TTCTGTCTTCAATA-GTTTTAGAGCTA- |
| | | CCCTTACTCGCGATACTCTCGAC- |
| | | TTTTTTTTcagccaactccaaTTTTTTTT- |
| | | GTCGAGAGTATCGCGAGTAAGGG |
| SOX5 | 781 | g-CTCTAGACAACCTC-GTTTTAGAGCTA- |
| | | CCCTTACTCGCGATACTCTCGAC- |
| | | TTTTTTTTcagccaactccaaTTTTTTTT- |
| | | GTCGAGAGTATCGCGAGTAAGGG |
| SOX5 | 782 | -GACAAGTTGTTTAC-GTTTTAGAGCTA- |
| | | CCCTTACTCGCGATACTCTCGAC- |
| | | TTTTTTTTcagccaactccaaTTTTTTTT- |
| | | GTCGAGAGTATCGCGAGTAAGGG |
| SOX5 | 783 | g-AGAGAGCCTAGAAA-GTTTTAGAGCTA- |
| | | CCCTTACTCGCGATACTCTCGAC- |
| | | TTTTTTTTcagccaactccaaTTTTTTTT- |
| | | GTCGAGAGTATCGCGAGTAAGGG |
| SOX5 | 784 | -GGTCAAGGAGTCCT-GTTTTAGAGCTA- |
| | | CCCTTACTCGCGATACTCTCGAC- |
| | | TTTTTTTTcagccaactccaaTTTTTTTT- |
| | | GTCGAGAGTATCGCGAGTAAGGG |
| SOX5 | 785 | g-TTGAGAGCAACACG-GTTTTAGAGCTA- |
| | | CCCTTACTCGCGATACTCTCGAC- |
| | | TTTTTTTTcagccaactccaaTTTTTTTT- |
| | | GTCGAGAGTATCGCGAGTAAGGG |
| SOX5 | 786 | g-TCATGACCAGCAAA-GTTTTAGAGCTA- |
| | | CCCTTACTCGCGATACTCTCGAC- |
| | | TTTTTTTTcagccaactccaaTTTTTTTT- |
| | | GTCGAGAGTATCGCGAGTAAGGG |
| SOX5 | 787 | g-CGGTCACCGCGGCC-GTTTTAGAGCTA- |
| | | CCCTTACTCGCGATACTCTCGAC- |
| | | TTTTTTTTcagccaactccaaTTTTTTTT- |
| | | GTCGAGAGTATCGCGAGTAAGGG |
| SOX5 | 788 | -GTGCAAATAACAAA-GTTTTAGAGCTA- |
| | | CCCTTACTCGCGATACTCTCGAC- |
| | | TTTTTTTTcagccaactccaaTTTTTTTT- |
| | | GTCGAGAGTATCGCGAGTAAGGG |
| SOX5 | 789 | g-TAACCACACAATGA-GTTTTAGAGCTA- |
| | | CCGCGGACGGTAAGCACGGAATA- |
| | | TTTTTTTTcagccaactccaaTTTTTTTT- |
| | | TATTCCGTGCTTACCGTCCGCGG |
| SOX5 | 790 | g-ACTCTCTTGTATTC-GTTTTAGAGCTA- |
| | | CCGCGGACGGTAAGCACGGAATA- |
| | | TTTTTTTTcagccaactccaaTTTTTTTT- |
| | | TATTCCGTGCTTACCGTCCGCGG |
| SOX5 | 791 | g-AACAATGGCCAAGC-GTTTTAGAGCTA- |
| | | CCGCGGACGGTAAGCACGGAATA- |
| | | TTTTTTTTcagccaactccaaTTTTTTTT- |
| | | TATTCCGTGCTTACCGTCCGCGG |
| SOX5 | 792 | g-TTCTGTCTTCAATA-GTTTTAGAGCTA- |
| | | CCGCGGACGGTAAGCACGGAATA- |
| | | TTTTTTTTcagccaactccaaTTTTTTTT- |
| | | TATTCCGTGCTTACCGTCCGCGG |
| SOX5 | 793 | g-CTCTAGACAACCTC-GTTTTAGAGCTA- |
| | | CCGCGGACGGTAAGCACGGAATA- |
| | | TTTTTTTTcagccaactccaaTTTTTTTT- |
| | | TATTCCGTGCTTACCGTCCGCGG |
| SOX5 | 794 | -GACAAGTTGTTTAC-GTTTTAGAGCTA- |
| | | CCGCGGACGGTAAGCACGGAATA- |
| | | TTTTTTTTcagccaactccaaTTTTTTTT- |
| | | TATTCCGTGCTTACCGTCCGCGG |
| SOX5 | 795 | g-AGAGAGCCTAGAAA-GTTTTAGAGCTA- |
| | | CCGCGGACGGTAAGCACGGAATA- |
| | | TTTTTTTTcagccaactccaaTTTTTTTT- |
| | | TATTCCGTGCTTACCGTCCGCGG |
| SOX5 | 796 | -GGTCAAGGAGTCCT-GTTTTAGAGCTA- |
| | | CCGCGGACGGTAAGCACGGAATA- |
| | | TTTTTTTTcagccaactccaaTTTTTTTT- |
| | | TATTCCGTGCTTACCGTCCGCGG |
| SOX5 | 797 | g-TTGAGAGCAACACG-GTTTTAGAGCTA- |
| | | CCGCGGACGGTAAGCACGGAATA- |
| | | TTTTTTTTcagccaactccaaTTTTTTTT- |
| | | TATTCCGTGCTTACCGTCCGCGG |
| SOX5 | 798 | g-TCATGACCAGCAAA-GTTTTAGAGCTA- |
| | | CCGCGGACGGTAAGCACGGAATA- |
| | | TTTTTTTTcagccaactccaaTTTTTTTT- |
| | | TATTCCGTGCTTACCGTCCGCGG |
| SOX5 | 799 | g-CGGTCACCGCGGCC-GTTTTAGAGCTA- |
| | | CCGCGGACGGTAAGCACGGAATA- |
| | | TTTTTTTTcagccaactccaaTTTTTTTT- |
| | | TATTCCGTGCTTACCGTCCGCGG |
| SOX5 | 800 | -GTGCAAATAACAAA-GTTTTAGAGCTA- |
| | | CCGCGGACGGTAAGCACGGAATA- |
| | | TTTTTTTTcagccaactccaaTTTTTTTT- |
| | | TATTCCGTGCTTACCGTCCGCGG |
| SOX5 | 801 | g-TAACCACACAATGA-GTTTTAGAGCTA- |
| | | CCTATAGTCACGAATCGTAGGGT- |
| | | TTTTTTTTcagccaactccaaTTTTTTTT- |
| | | ACCCTACGATTCGTGACTATAGG |
| SOX5 | 802 | g-ACTCTCTTGTATTC-GTTTTAGAGCTA- |
| | | CCTATAGTCACGAATCGTAGGGT- |
| | | TTTTTTTTcagccaactccaaTTTTTTTT- |
| | | ACCCTACGATTCGTGACTATAGG |
| SOX5 | 803 | g-AACAATGGCCAAGC-GTTTTAGAGCTA- |
| | | CCTATAGTCACGAATCGTAGGGT- |
| | | TTTTTTTTcagccaactccaaTTTTTTTT- |
| | | ACCCTACGATTCGTGACTATAGG |
| SOX5 | 804 | g-TTCTGTCTTCAATA-GTTTTAGAGCTA- |
| | | CCTATAGTCACGAATCGTAGGGT- |
| | | TTTTTTTTcagccaactccaaTTTTTTTT- |
| | | ACCCTACGATTCGTGACTATAGG |
| SOX5 | 805 | g-CTCTAGACAACCTC-GTTTTAGAGCTA- |
| | | CCTATAGTCACGAATCGTAGGGT- |
| | | TTTTTTTTcagccaactccaaTTTTTTTT- |
| | | ACCCTACGATTCGTGACTATAGG |
| SOX5 | 806 | -GACAAGTTGTTTAC-GTTTTAGAGCTA- |
| | | CCTATAGTCACGAATCGTAGGGT- |
| | | TTTTTTTTcagccaactccaaTTTTTTTT- |
| | | ACCCTACGATTCGTGACTATAGG |
| SOX5 | 807 | g-AGAGAGCCTAGAAA-GTTTTAGAGCTA- |
| | | CCTATAGTCACGAATCGTAGGGT- |
| | | TTTTTTTTcagccaactccaaTTTTTTTT- |
| | | ACCCTACGATTCGTGACTATAGG |
| SOX5 | 808 | -GGTCAAGGAGTCCT-GTTTTAGAGCTA- |
| | | CCTATAGTCACGAATCGTAGGGT- |
| | | TTTTTTTTcagccaactccaaTTTTTTTT- |
| | | ACCCTACGATTCGTGACTATAGG |
| SOX5 | 809 | g-TTGAGAGCAACACG-GTTTTAGAGCTA- |
| | | CCTATAGTCACGAATCGTAGGGT- |
| | | TTTTTTTTcagccaactccaaTTTTTTTT- |
| | | ACCCTACGATTCGTGACTATAGG |
| SOX5 | 810 | g-TCATGACCAGCAAA-GTTTTAGAGCTA- |
| | | CCTATAGTCACGAATCGTAGGGT- |
| | | TTTTTTTTcagccaactccaaTTTTTTTT- |
| | | ACCCTACGATTCGTGACTATAGG |
| SOX5 | 811 | g-CGGTCACCGCGGCC-GTTTTAGAGCTA- |
| | | CCTATAGTCACGAATCGTAGGGT- |
| | | TTTTTTTTcagccaactccaaTTTTTTTT- |
| | | ACCCTACGATTCGTGACTATAGG |
| SOX5 | 812 | -GTGCAAATAACAAA-GTTTTAGAGCTA- |
| | | CCTATAGTCACGAATCGTAGGGT- |
| | | TTTTTTTTcagccaactccaaTTTTTTTT- |
| | | ACCCTACGATTCGTGACTATAGG |
| SOX5 | 813 | g-TAACCACACAATGA-GTTTTAGAGCTA- |
| | | CCCGTCGTCACGTATGCGTAGCA- |
| | | TTTTTTTTcagccaactccaaTTTTTTTT- |
| | | TGCTACGCATACGTGACGACGGG |
| SOX5 | 814 | g-ACTCTCTTGTATTC-GTTTTAGAGCTA- |
| | | CCCGTCGTCACGTATGCGTAGCA- |
| | | TTTTTTTTcagccaactccaaTTTTTTTT- |
| | | TGCTACGCATACGTGACGACGGG |
| SOX5 | 815 | g-AACAATGGCCAAGC-GTTTTAGAGCTA- |
| | | CCCGTCGTCACGTATGCGTAGCA- |
| | | TTTTTTTTcagccaactccaaTTTTTTTT- |
| | | TGCTACGCATACGTGACGACGGG |
| SOX5 | 816 | g-TTCTGTCTTCAATA-GTTTTAGAGCTA- |
| | | CCCGTCGTCACGTATGCGTAGCA- |
| | | TTTTTTTTcagccaactccaaTTTTTTTT- |
| | | TGCTACGCATACGTGACGACGGG |
| SOX5 | 817 | g-CTCTAGACAACCTC-GTTTTAGAGCTA- |
| | | CCCGTCGTCACGTATGCGTAGCA- |
| | | TTTTTTTTcagccaactccaaTTTTTTTT- |
| | | TGCTACGCATACGTGACGACGGG |
| SOX5 | 818 | -GACAAGTTGTTTAC-GTTTTAGAGCTA- |
| | | CCCGTCGTCACGTATGCGTAGCA- |
| | | TTTTTTTTcagccaactccaaTTTTTTTT- |
| | | TGCTACGCATACGTGACGACGGG |
| SOX5 | 819 | g-AGAGAGCCTAGAAA-GTTTTAGAGCTA- |
| | | CCCGTCGTCACGTATGCGTAGCA- |
| | | TTTTTTTTcagccaactccaaTTTTTTTT- |
| | | TGCTACGCATACGTGACGACGGG |
| SOX5 | 820 | -GGTCAAGGAGTCCT-GTTTTAGAGCTA- |
| | | CCCGTCGTCACGTATGCGTAGCA- |
| | | TTTTTTTTcagccaactccaaTTTTTTTT- |
| | | TGCTACGCATACGTGACGACGGG |
| SOX5 | 821 | g-TTGAGAGCAACACG-GTTTTAGAGCTA- |
| | | CCCGTCGTCACGTATGCGTAGCA- |
| | | TTTTTTTTcagccaactccaaTTTTTTTT- |
| | | TGCTACGCATACGTGACGACGGG |
| SOX5 | 822 | g-TCATGACCAGCAAA-GTTTTAGAGCTA- |
| | | CCCGTCGTCACGTATGCGTAGCA- |
| | | TTTTTTTTcagccaactccaaTTTTTTTT- |
| | | TGCTACGCATACGTGACGACGGG |
| SOX5 | 823 | g-CGGTCACCGCGGCC-GTTTTAGAGCTA- |
| | | CCCGTCGTCACGTATGCGTAGCA- |
| | | TTTTTTTTcagccaactccaaTTTTTTTT- |
| | | TGCTACGCATACGTGACGACGGG |
| SOX5 | 824 | -GTGCAAATAACAAA-GTTTTAGAGCTA- |
| | | CCCGTCGTCACGTATGCGTAGCA- |
| | | TTTTTTTTcagccaactccaaTTTTTTTT- |
| | | TGCTACGCATACGTGACGACGGG |
| SOX5 | 825 | g-TAACCACACAATGA-GTTTTAGAGCTA- |
| | | CCCGAGAGGTAGTAGACGACGCA- |
| | | TTTTTTTTcagccaactccaaTTTTTTTT- |
| | | TGCGTCGTCTACTACCTCTCGGG |
| SOX5 | 826 | g-ACTCTCTTGTATTC-GTTTTAGAGCTA- |
| | | CCCGAGAGGTAGTAGACGACGCA- |
| | | TTTTTTTTcagccaactccaaTTTTTTTT- |
| | | TGCGTCGTCTACTACCTCTCGGG |
| SOX5 | 827 | g-AACAATGGCCAAGC-GTTTTAGAGCTA- |
| | | CCCGAGAGGTAGTAGACGACGCA- |
| | | TTTTTTTTcagccaactccaaTTTTTTTT- |
| | | TGCGTCGTCTACTACCTCTCGGG |
| SOX5 | 828 | g-TTCTGTCTTCAATA-GTTTTAGAGCTA- |
| | | CCCGAGAGGTAGTAGACGACGCA- |
| | | TTTTTTTTcagccaactccaaTTTTTTTT- |
| | | TGCGTCGTCTACTACCTCTCGGG |
| SOX5 | 829 | g-CTCTAGACAACCTC-GTTTTAGAGCTA- |
| | | CCCGAGAGGTAGTAGACGACGCA- |
| | | TTTTTTTTcagccaactccaaTTTTTTTT- |
| | | TGCGTCGTCTACTACCTCTCGGG |
| SOX5 | 830 | -GACAAGTTGTTTAC-GTTTTAGAGCTA- |
| | | CCCGAGAGGTAGTAGACGACGCA- |
| | | TTTTTTTTcagccaactccaaTTTTTTTT- |
| | | TGCGTCGTCTACTACCTCTCGGG |
| SOX5 | 831 | g-AGAGAGCCTAGAAA-GTTTTAGAGCTA- |
| | | CCCGAGAGGTAGTAGACGACGCA- |
| | | TTTTTTTTcagccaactccaaTTTTTTTT- |
| | | TGCGTCGTCTACTACCTCTCGGG |
| SOX5 | 832 | -GGTCAAGGAGTCCT-GTTTTAGAGCTA- |
| | | CCCGAGAGGTAGTAGACGACGCA- |
| | | TTTTTTTTcagccaactccaaTTTTTTTT- |
| | | TGCGTCGTCTACTACCTCTCGGG |
| SOX5 | 833 | g-TTGAGAGCAACACG-GTTTTAGAGCTA- |
| | | CCCGAGAGGTAGTAGACGACGCA- |
| | | TTTTTTTTcagccaactccaaTTTTTTTT- |
| | | TGCGTCGTCTACTACCTCTCGGG |
| SOX5 | 834 | g-TCATGACCAGCAAA-GTTTTAGAGCTA- |
| | | CCCGAGAGGTAGTAGACGACGCA- |
| | | TTTTTTTTcagccaactccaaTTTTTTTT- |
| | | TGCGTCGTCTACTACCTCTCGGG |
| SOX5 | 835 | g-CGGTCACCGCGGCC-GTTTTAGAGCTA- |
| | | CCCGAGAGGTAGTAGACGACGCA- |
| | | TTTTTTTTcagccaactccaaTTTTTTTT- |
| | | TGCGTCGTCTACTACCTCTCGGG |
| SOX5 | 836 | -GTGCAAATAACAAA-GTTTTAGAGCTA- |
| | | CCCGAGAGGTAGTAGACGACGCA- |
| | | TTTTTTTTcagccaactccaaTTTTTTTT- |
| | | TGCGTCGTCTACTACCTCTCGGG |
| SOX5 | 837 | g-TAACCACACAATGA-GTTTTAGAGCTA- |
| | | CCGACGTCTACGGACGGGAGCTA- |
| | | TTTTTTTTcagccaactccaaTTTTTTTT- |
| | | TAGCTCCCGTCCGTAGACGTCGG |
| SOX5 | 838 | g-ACTCTCTTGTATTC-GTTTTAGAGCTA- |
| | | CCGACGTCTACGGACGGGAGCTA- |
| | | TTTTTTTTcagccaactccaaTTTTTTTT- |
| | | TAGCTCCCGTCCGTAGACGTCGG |
| SOX5 | 839 | g-AACAATGGCCAAGC-GTTTTAGAGCTA- |
| | | CCGACGTCTACGGACGGGAGCTA- |
| | | TTTTTTTTcagccaactccaaTTTTTTTT- |
| | | TAGCTCCCGTCCGTAGACGTCGG |
| SOX5 | 840 | g-TTCTGTCTTCAATA-GTTTTAGAGCTA- |
| | | CCGACGTCTACGGACGGGAGCTA- |
| | | TTTTTTTTcagccaactccaaTTTTTTTT- |
| | | TAGCTCCCGTCCGTAGACGTCGG |
| SOX5 | 841 | g-CTCTAGACAACCTC-GTTTTAGAGCTA- |
| | | CCGACGTCTACGGACGGGAGCTA- |
| | | TTTTTTTTcagccaactccaaTTTTTTTT- |
| | | TAGCTCCCGTCCGTAGACGTCGG |
| SOX5 | 842 | -GACAAGTTGTTTAC-GTTTTAGAGCTA- |
| | | CCGACGTCTACGGACGGGAGCTA- |
| | | TTTTTTTTcagccaactccaaTTTTTTTT- |
| | | TAGCTCCCGTCCGTAGACGTCGG |
| SOX5 | 843 | g-AGAGAGCCTAGAAA-GTTTTAGAGCTA- |
| | | CCGACGTCTACGGACGGGAGCTA- |
| | | TTTTTTTTcagccaactccaaTTTTTTTT- |
| | | TAGCTCCCGTCCGTAGACGTCGG |
| SOX5 | 844 | -GGTCAAGGAGTCCT-GTTTTAGAGCTA- |
| | | CCGACGTCTACGGACGGGAGCTA- |
| | | TTTTTTTTcagccaactccaaTTTTTTTT- |
| | | TAGCTCCCGTCCGTAGACGTCGG |
| SOX5 | 845 | g-TTGAGAGCAACACG-GTTTTAGAGCTA- |
| | | CCGACGTCTACGGACGGGAGCTA- |
| | | TTTTTTTTcagccaactccaaTTTTTTTT- |
| | | TAGCTCCCGTCCGTAGACGTCGG |
| SOX5 | 846 | g-TCATGACCAGCAAA-GTTTTAGAGCTA- |
| | | CCGACGTCTACGGACGGGAGCTA- |
| | | TTTTTTTTcagccaactccaaTTTTTTTT- |
| | | TAGCTCCCGTCCGTAGACGTCGG |
| SOX5 | 847 | g-CGGTCACCGCGGCC-GTTTTAGAGCTA- |
| | | CCGACGTCTACGGACGGGAGCTA- |
| | | TTTTTTTTcagccaactccaaTTTTTTTT- |
| | | TAGCTCCCGTCCGTAGACGTCGG |
| SOX5 | 848 | -GTGCAAATAACAAA-GTTTTAGAGCTA- |
| | | CCGACGTCTACGGACGGGAGCTA- |
| | | TTTTTTTTcagccaactccaaTTTTTTTT- |
| | | TAGCTCCCGTCCGTAGACGTCGG |
| SOX5 | 849 | g-TAACCACACAATGA-GTTTTAGAGCTA- |
| | | CCAAAGCTCATTCGCGACTGAGC- |
| | | TTTTTTTTcagccaactccaaTTTTTTTT- |
| | | GCTCAGTCGCGAATGAGCTTTGG |
| SOX5 | 850 | g-ACTCTCTTGTATTC-GTTTTAGAGCTA- |
| | | CCAAAGCTCATTCGCGACTGAGC- |
| | | TTTTTTTTcagccaactccaaTTTTTTTT- |
| | | GCTCAGTCGCGAATGAGCTTTGG |
| SOX5 | 851 | g-AACAATGGCCAAGC-GTTTTAGAGCTA- |
| | | CCAAAGCTCATTCGCGACTGAGC- |
| | | TTTTTTTTcagccaactccaaTTTTTTTT- |
| | | GCTCAGTCGCGAATGAGCTTTGG |
| SOX5 | 852 | g-TTCTGTCTTCAATA-GTTTTAGAGCTA- |
| | | CCAAAGCTCATTCGCGACTGAGC- |
| | | TTTTTTTTcagccaactccaaTTTTTTTT- |
| | | GCTCAGTCGCGAATGAGCTTTGG |
| SOX5 | 853 | g-CTCTAGACAACCTC-GTTTTAGAGCTA- |
| | | CCAAAGCTCATTCGCGACTGAGC- |
| | | TTTTTTTTcagccaactccaaTTTTTTTT- |
| | | GCTCAGTCGCGAATGAGCTTTGG |
| SOX5 | 854 | -GACAAGTTGTTTAC-GTTTTAGAGCTA- |
| | | CCAAAGCTCATTCGCGACTGAGC- |
| | | TTTTTTTTcagccaactccaaTTTTTTTT- |
| | | GCTCAGTCGCGAATGAGCTTTGG |
| SOX5 | 855 | g-AGAGAGCCTAGAAA-GTTTTAGAGCTA- |
| | | CCAAAGCTCATTCGCGACTGAGC- |
| | | TTTTTTTTcagccaactccaaTTTTTTTT- |
| | | GCTCAGTCGCGAATGAGCTTTGG |
| SOX5 | 856 | -GGTCAAGGAGTCCT-GTTTTAGAGCTA- |
| | | CCAAAGCTCATTCGCGACTGAGC- |
| | | TTTTTTTTcagccaactccaaTTTTTTTT- |
| | | GCTCAGTCGCGAATGAGCTTTGG |
| SOX5 | 857 | g-TTGAGAGCAACACG-GTTTTAGAGCTA- |
| | | CCAAAGCTCATTCGCGACTGAGC- |
| | | TTTTTTTTcagccaactccaaTTTTTTTT- |
| | | GCTCAGTCGCGAATGAGCTTTGG |
| SOX5 | 858 | g-TCATGACCAGCAAA-GTTTTAGAGCTA- |
| | | CCAAAGCTCATTCGCGACTGAGC- |
| | | TTTTTTTTcagccaactccaaTTTTTTTT- |
| | | GCTCAGTCGCGAATGAGCTTTGG |
| SOX5 | 859 | g-CGGTCACCGCGGCC-GTTTTAGAGCTA- |
| | | CCAAAGCTCATTCGCGACTGAGC- |
| | | TTTTTTTTcagccaactccaaTTTTTTTT- |
| | | GCTCAGTCGCGAATGAGCTTTGG |
| SOX5 | 860 | -GTGCAAATAACAAA-GTTTTAGAGCTA- |
| | | CCAAAGCTCATTCGCGACTGAGC- |
| | | TTTTTTTTcagccaactccaaTTTTTTTT- |
| | | GCTCAGTCGCGAATGAGCTTTGG |
| SOX5 | 861 | g-TAACCACACAATGA-GTTTTAGAGCTA- |
| | | CCATGGCACGATCGACACGGAGG- |
| | | TTTTTTTTcagccaactccaaTTTTTTTT- |
| | | CCTCCGTGTCGATCGTGCCATGG |
| SOX5 | 862 | g-ACTCTCTTGTATTC-GTTTTAGAGCTA- |
| | | CCATGGCACGATCGACACGGAGG- |
| | | TTTTTTTTcagccaactccaaTTTTTTTT- |
| | | CCTCCGTGTCGATCGTGCCATGG |
| SOX5 | 863 | g-AACAATGGCCAAGC-GTTTTAGAGCTA- |
| | | CCATGGCACGATCGACACGGAGG- |
| | | TTTTTTTTcagccaactccaaTTTTTTTT- |
| | | CCTCCGTGTCGATCGTGCCATGG |
| SOX5 | 864 | g-TTCTGTCTTCAATA-GTTTTAGAGCTA- |
| | | CCATGGCACGATCGACACGGAGG- |
| | | TTTTTTTTcagccaactccaaTTTTTTTT- |
| | | CCTCCGTGTCGATCGTGCCATGG |
| SOX5 | 865 | g-CTCTAGACAACCTC-GTTTTAGAGCTA- |
| | | CCATGGCACGATCGACACGGAGG- |
| | | TTTTTTTTcagccaactccaaTTTTTTTT- |
| | | CCTCCGTGTCGATCGTGCCATGG |
| SOX5 | 866 | -GACAAGTTGTTTAC-GTTTTAGAGCTA- |
| | | CCATGGCACGATCGACACGGAGG- |
| | | TTTTTTTTcagccaactccaaTTTTTTTT- |
| | | CCTCCGTGTCGATCGTGCCATGG |
| SOX5 | 867 | g-AGAGAGCCTAGAAA-GTTTTAGAGCTA- |
| | | CCATGGCACGATCGACACGGAGG- |
| | | TTTTTTTTcagccaactccaaTTTTTTTT- |
| | | CCTCCGTGTCGATCGTGCCATGG |
| SOX5 | 868 | -GGTCAAGGAGTCCT-GTTTTAGAGCTA- |
| | | CCATGGCACGATCGACACGGAGG- |
| | | TTTTTTTTcagccaactccaaTTTTTTTT- |
| | | CCTCCGTGTCGATCGTGCCATGG |
| SOX5 | 869 | g-TTGAGAGCAACACG-GTTTTAGAGCTA- |
| | | CCATGGCACGATCGACACGGAGG- |
| | | TTTTTTTTcagccaactccaaTTTTTTTT- |
| | | CCTCCGTGTCGATCGTGCCATGG |
| SOX5 | 870 | g-TCATGACCAGCAAA-GTTTTAGAGCTA- |
| | | CCATGGCACGATCGACACGGAGG- |
| | | TTTTTTTTcagccaactccaaTTTTTTTT- |
| | | CCTCCGTGTCGATCGTGCCATGG |
| SOX5 | 871 | g-CGGTCACCGCGGCC-GTTTTAGAGCTA- |
| | | CCATGGCACGATCGACACGGAGG- |
| | | TTTTTTTTcagccaactccaaTTTTTTTT- |
| | | CCTCCGTGTCGATCGTGCCATGG |
| SOX5 | 872 | -GTGCAAATAACAAA-GTTTTAGAGCTA- |
| | | CCATGGCACGATCGACACGGAGG- |
| | | TTTTTTTTcagccaactccaaTTTTTTTT- |
| | | CCTCCGTGTCGATCGTGCCATGG |
| SOX5 | 873 | g-TAACCACACAATGA-GTTTTAGAGCTA- |
| | | CCCGAACTCTCTATCGAACGAGT- |
| | | TTTTTTTTcagccaactccaaTTTTTTTT- |
| | | ACTCGTTCGATAGAGAGTTCGGG |
| SOX5 | 874 | g-ACTCTCTTGTATTC-GTTTTAGAGCTA- |
| | | CCCGAACTCTCTATCGAACGAGT- |
| | | TTTTTTTTcagccaactccaaTTTTTTTT- |
| | | ACTCGTTCGATAGAGAGTTCGGG |
| SOX5 | 875 | g-AACAATGGCCAAGC-GTTTTAGAGCTA- |
| | | CCCGAACTCTCTATCGAACGAGT- |
| | | TTTTTTTTcagccaactccaaTTTTTTTT- |
| | | ACTCGTTCGATAGAGAGTTCGGG |
| SOX5 | 876 | g-TTCTGTCTTCAATA-GTTTTAGAGCTA- |
| | | CCCGAACTCTCTATCGAACGAGT- |
| | | TTTTTTTTcagccaactccaaTTTTTTTT- |
| | | ACTCGTTCGATAGAGAGTTCGGG |
| SOX5 | 877 | g-CTCTAGACAACCTC-GTTTTAGAGCTA- |
| | | CCCGAACTCTCTATCGAACGAGT- |
| | | TTTTTTTTcagccaactccaaTTTTTTTT- |
| | | ACTCGTTCGATAGAGAGTTCGGG |
| SOX5 | 878 | -GACAAGTTGTTTAC-GTTTTAGAGCTA- |
| | | CCCGAACTCTCTATCGAACGAGT- |
| | | TTTTTTTTcagccaactccaaTTTTTTTT- |
| | | ACTCGTTCGATAGAGAGTTCGGG |
| SOX5 | 879 | g-AGAGAGCCTAGAAA-GTTTTAGAGCTA- |
| | | CCCGAACTCTCTATCGAACGAGT- |
| | | TTTTTTTTcagccaactccaaTTTTTTTT- |
| | | ACTCGTTCGATAGAGAGTTCGGG |
| SOX5 | 880 | -GGTCAAGGAGTCCT-GTTTTAGAGCTA- |
| | | CCCGAACTCTCTATCGAACGAGT- |
| | | TTTTTTTTcagccaactccaaTTTTTTTT- |
| | | ACTCGTTCGATAGAGAGTTCGGG |
| SOX5 | 881 | g-TTGAGAGCAACACG-GTTTTAGAGCTA- |
| | | CCCGAACTCTCTATCGAACGAGT- |
| | | TTTTTTTTcagccaactccaaTTTTTTTT- |
| | | ACTCGTTCGATAGAGAGTTCGGG |
| SOX5 | 882 | g-TCATGACCAGCAAA-GTTTTAGAGCTA- |
| | | CCCGAACTCTCTATCGAACGAGT- |
| | | TTTTTTTTcagccaactccaaTTTTTTTT- |
| | | ACTCGTTCGATAGAGAGTTCGGG |
| SOX5 | 883 | g-CGGTCACCGCGGCC-GTTTTAGAGCTA- |
| | | CCCGAACTCTCTATCGAACGAGT- |
| | | TTTTTTTTcagccaactccaaTTTTTTTT- |
| | | ACTCGTTCGATAGAGAGTTCGGG |
| SOX5 | 884 | -GTGCAAATAACAAA-GTTTTAGAGCTA- |
| | | CCCGAACTCTCTATCGAACGAGT- |
| | | TTTTTTTTcagccaactccaaTTTTTTTT- |
| | | ACTCGTTCGATAGAGAGTTCGGG |
| SOX5 | 885 | g-TAACCACACAATGA-GTTTTAGAGCTA- |
| | | CCTACACGATAGTGGTCGTGCGC- |
| | | TTTTTTTTcagccaactccaaTTTTTTTT- |
| | | GCGCACGACCACTATCGTGTAGG |
| SOX5 | 886 | g-ACTCTCTTGTATTC-GTTTTAGAGCTA- |
| | | CCTACACGATAGTGGTCGTGCGC- |
| | | TTTTTTTTcagccaactccaaTTTTTTTT- |
| | | GCGCACGACCACTATCGTGTAGG |
| SOX5 | 887 | g-AACAATGGCCAAGC-GTTTTAGAGCTA- |
| | | CCTACACGATAGTGGTCGTGCGC- |
| | | TTTTTTTTcagccaactccaaTTTTTTTT- |
| | | GCGCACGACCACTATCGTGTAGG |
| SOX5 | 888 | g-TTCTGTCTTCAATA-GTTTTAGAGCTA- |
| | | CCTACACGATAGTGGTCGTGCGC- |
| | | TTTTTTTTcagccaactccaaTTTTTTTT- |
| | | GCGCACGACCACTATCGTGTAGG |
| SOX5 | 889 | g-CTCTAGACAACCTC-GTTTTAGAGCTA- |
| | | CCTACACGATAGTGGTCGTGCGC- |
| | | TTTTTTTTcagccaactccaaTTTTTTTT- |
| | | GCGCACGACCACTATCGTGTAGG |
| SOX5 | 890 | -GACAAGTTGTTTAC-GTTTTAGAGCTA- |
| | | CCTACACGATAGTGGTCGTGCGC- |
| | | TTTTTTTTcagccaactccaaTTTTTTTT- |
| | | GCGCACGACCACTATCGTGTAGG |
| SOX5 | 891 | g-AGAGAGCCTAGAAA-GTTTTAGAGCTA- |
| | | CCTACACGATAGTGGTCGTGCGC- |
| | | TTTTTTTTcagccaactccaaTTTTTTTT- |
| | | GCGCACGACCACTATCGTGTAGG |
| SOX5 | 892 | -GGTCAAGGAGTCCT-GTTTTAGAGCTA- |
| | | CCTACACGATAGTGGTCGTGCGC- |
| | | TTTTTTTTcagccaactccaaTTTTTTTT- |
| | | GCGCACGACCACTATCGTGTAGG |
| SOX5 | 893 | g-TTGAGAGCAACACG-GTTTTAGAGCTA- |
| | | CCTACACGATAGTGGTCGTGCGC- |
| | | TTTTTTTTcagccaactccaaTTTTTTTT- |
| | | GCGCACGACCACTATCGTGTAGG |
| SOX5 | 894 | g-TCATGACCAGCAAA-GTTTTAGAGCTA- |
| | | CCTACACGATAGTGGTCGTGCGC- |
| | | TTTTTTTTcagccaactccaaTTTTTTTT- |
| | | GCGCACGACCACTATCGTGTAGG |
| SOX5 | 895 | g-CGGTCACCGCGGCC-GTTTTAGAGCTA- |
| | | CCTACACGATAGTGGTCGTGCGC- |
| | | TTTTTTTTcagccaactccaaTTTTTTTT- |
| | | GCGCACGACCACTATCGTGTAGG |
| SOX5 | 896 | -GTGCAAATAACAAA-GTTTTAGAGCTA- |
| | | CCTACACGATAGTGGTCGTGCGC- |
| | | TTTTTTTTcagccaactccaaTTTTTTTT- |
| | | GCGCACGACCACTATCGTGTAGG |
| SOX5 | 897 | g-TAACCACACAATGA-GTTTTAGAGCTA- |
| | | CCCTGGCGGAACGTTCGAGTAAT- |
| | | TTTTTTTTcagccaactccaaTTTTTTTT- |
| | | ATTACTCGAACGTTCCGCCAGGG |
| SOX5 | 898 | g-ACTCTCTTGTATTC-GTTTTAGAGCTA- |
| | | CCCTGGCGGAACGTTCGAGTAAT- |
| | | TTTTTTTTcagccaactccaaTTTTTTTT- |
| | | ATTACTCGAACGTTCCGCCAGGG |
| SOX5 | 899 | g-AACAATGGCCAAGC-GTTTTAGAGCTA- |
| | | CCCTGGCGGAACGTTCGAGTAAT- |
| | | TTTTTTTTcagccaactccaaTTTTTTTT- |
| | | ATTACTCGAACGTTCCGCCAGGG |
| SOX5 | 900 | g-TTCTGTCTTCAATA-GTTTTAGAGCTA- |
| | | CCCTGGCGGAACGTTCGAGTAAT- |
| | | TTTTTTTTcagccaactccaaTTTTTTTT- |
| | | ATTACTCGAACGTTCCGCCAGGG |
| SOX5 | 901 | g-CTCTAGACAACCTC-GTTTTAGAGCTA- |
| | | CCCTGGCGGAACGTTCGAGTAAT- |
| | | TTTTTTTTcagccaactccaaTTTTTTTT- |
| | | ATTACTCGAACGTTCCGCCAGGG |
| SOX5 | 902 | -GACAAGTTGTTTAC-GTTTTAGAGCTA- |
| | | CCCTGGCGGAACGTTCGAGTAAT- |
| | | TTTTTTTTcagccaactccaaTTTTTTTT- |
| | | ATTACTCGAACGTTCCGCCAGGG |
| SOX5 | 903 | g-AGAGAGCCTAGAAA-GTTTTAGAGCTA- |
| | | CCCTGGCGGAACGTTCGAGTAAT- |
| | | TTTTTTTTcagccaactccaaTTTTTTTT- |
| | | ATTACTCGAACGTTCCGCCAGGG |
| SOX5 | 904 | -GGTCAAGGAGTCCT-GTTTTAGAGCTA- |
| | | CCCTGGCGGAACGTTCGAGTAAT- |
| | | TTTTTTTTcagccaactccaaTTTTTTTT- |
| | | ATTACTCGAACGTTCCGCCAGGG |
| SOX5 | 905 | g-TTGAGAGCAACACG-GTTTTAGAGCTA- |
| | | CCCTGGCGGAACGTTCGAGTAAT- |
| | | TTTTTTTTcagccaactccaaTTTTTTTT- |
| | | ATTACTCGAACGTTCCGCCAGGG |
| SOX5 | 906 | g-TCATGACCAGCAAA-GTTTTAGAGCTA- |
| | | CCCTGGCGGAACGTTCGAGTAAT- |
| | | TTTTTTTTcagccaactccaaTTTTTTTT- |
| | | ATTACTCGAACGTTCCGCCAGGG |
| SOX5 | 907 | g-CGGTCACCGCGGCC-GTTTTAGAGCTA- |
| | | CCCTGGCGGAACGTTCGAGTAAT- |
| | | TTTTTTTTcagccaactccaaTTTTTTTT- |
| | | ATTACTCGAACGTTCCGCCAGGG |
| SOX5 | 908 | -GTGCAAATAACAAA-GTTTTAGAGCTA- |
| | | CCCTGGCGGAACGTTCGAGTAAT- |
| | | TTTTTTTTcagccaactccaaTTTTTTTT- |
| | | ATTACTCGAACGTTCCGCCAGGG |
| SOX5 | 909 | g-TAACCACACAATGA-GTTTTAGAGCTA- |
| | | CCTACACTCGACATCGGTAGCTA- |
| | | TTTTTTTTcagccaactccaaTTTTTTTT- |
| | | TAGCTACCGATGTCGAGTGTAGG |
| SOX5 | 910 | g-ACTCTCTTGTATTC-GTTTTAGAGCTA- |
| | | CCTACACTCGACATCGGTAGCTA- |
| | | TTTTTTTTcagccaactccaaTTTTTTTT- |
| | | TAGCTACCGATGTCGAGTGTAGG |
| SOX5 | 911 | g-AACAATGGCCAAGC-GTTTTAGAGCTA- |
| | | CCTACACTCGACATCGGTAGCTA- |
| | | TTTTTTTTcagccaactccaaTTTTTTTT- |
| | | TAGCTACCGATGTCGAGTGTAGG |
| SOX5 | 912 | g-TTCTGTCTTCAATA-GTTTTAGAGCTA- |
| | | CCTACACTCGACATCGGTAGCTA- |
| | | TTTTTTTTcagccaactccaaTTTTTTTT- |
| | | TAGCTACCGATGTCGAGTGTAGG |
| SOX5 | 913 | g-CTCTAGACAACCTC-GTTTTAGAGCTA- |
| | | CCTACACTCGACATCGGTAGCTA- |
| | | TTTTTTTTcagccaactccaaTTTTTTTT- |
| | | TAGCTACCGATGTCGAGTGTAGG |
| SOX5 | 914 | -GACAAGTTGTTTAC-GTTTTAGAGCTA- |
| | | CCTACACTCGACATCGGTAGCTA- |
| | | TTTTTTTTcagccaactccaaTTTTTTTT- |
| | | TAGCTACCGATGTCGAGTGTAGG |
| SOX5 | 915 | g-AGAGAGCCTAGAAA-GTTTTAGAGCTA- |
| | | CCTACACTCGACATCGGTAGCTA- |
| | | TTTTTTTTcagccaactccaaTTTTTTTT- |
| | | TAGCTACCGATGTCGAGTGTAGG |
| SOX5 | 916 | -GGTCAAGGAGTCCT-GTTTTAGAGCTA- |
| | | CCTACACTCGACATCGGTAGCTA- |
| | | TTTTTTTTcagccaactccaaTTTTTTTT- |
| | | TAGCTACCGATGTCGAGTGTAGG |
| SOX5 | 917 | g-TTGAGAGCAACACG-GTTTTAGAGCTA- |
| | | CCTACACTCGACATCGGTAGCTA- |
| | | TTTTTTTTcagccaactccaaTTTTTTTT- |
| | | TAGCTACCGATGTCGAGTGTAGG |
| SOX5 | 918 | g-TCATGACCAGCAAA-GTTTTAGAGCTA- |
| | | CCTACACTCGACATCGGTAGCTA- |
| | | TTTTTTTTcagccaactccaaTTTTTTTT- |
| | | TAGCTACCGATGTCGAGTGTAGG |
| SOX5 | 919 | g-CGGTCACCGCGGCC-GTTTTAGAGCTA- |
| | | CCTACACTCGACATCGGTAGCTA- |
| | | TTTTTTTTcagccaactccaaTTTTTTTT- |
| | | TAGCTACCGATGTCGAGTGTAGG |
| SOX5 | 920 | -GTGCAAATAACAAA-GTTTTAGAGCTA- |
| | | CCTACACTCGACATCGGTAGCTA- |
| | | TTTTTTTTcagccaactccaaTTTTTTTT- |
| | | TAGCTACCGATGTCGAGTGTAGG |
| SOX6 | 921 | g-CCAAATGCAAGGAT-GTTTTAGAGCTA- |
| | | CCGTCGTTGTACCGTCTACTTGAC- |
| | | TTTTTTTTcagccaactccaaTTTTTTTT- |
| | | GTCAAGTAGACGGTACAACGACGG |
| SOX6 | 922 | g-CCAATCCTTGCATT-GTTTTAGAGCTA- |
| | | CCGTCGTTGTACCGTCTACTTGAC- |
| | | TTTTTTTTcagccaactccaaTTTTTTTT- |
| | | GTCAAGTAGACGGTACAACGACGG |
| SOX6 | 923 | -GTGATAGTTAGCAA-GTTTTAGAGCTA- |
| | | CCGTCGTTGTACCGTCTACTTGAC- |
| | | TTTTTTTTcagccaactccaaTTTTTTTT- |
| | | GTCAAGTAGACGGTACAACGACGG |
| SOX6 | 924 | g-TGAAAAAGAACTCC-GTTTTAGAGCTA- |
| | | CCGTCGTTGTACCGTCTACTTGAC- |
| | | TTTTTTTTcagccaactccaaTTTTTTTT- |
| | | GTCAAGTAGACGGTACAACGACGG |
| SOX6 | 925 | g-ATAAGCTCAAAAGC-GTTTTAGAGCTA- |
| | | CCGTCGTTGTACCGTCTACTTGAC- |
| | | TTTTTTTTcagccaactccaaTTTTTTTT- |
| | | GTCAAGTAGACGGTACAACGACGG |
| SOX6 | 926 | g-AGTTGGAGTTACTA-GTTTTAGAGCTA- |
| | | CCGTCGTTGTACCGTCTACTTGAC- |
| | | TTTTTTTTcagccaactccaaTTTTTTTT- |
| | | GTCAAGTAGACGGTACAACGACGG |
| SOX6 | 927 | g-TTCAAGGACATGAA-GTTTTAGAGCTA- |
| | | CCGTCGTTGTACCGTCTACTTGAC- |
| | | TTTTTTTTcagccaactccaaTTTTTTTT- |
| | | GTCAAGTAGACGGTACAACGACGG |
| SOX6 | 928 | g-AACTACACTCAGTT-GTTTTAGAGCTA- |
| | | CCGTCGTTGTACCGTCTACTTGAC- |
| | | TTTTTTTTcagccaactccaaTTTTTTTT- |
| | | GTCAAGTAGACGGTACAACGACGG |
| SOX6 | 929 | -GGGTTCCACGCCTT-GTTTTAGAGCTA- |
| | | CCGTCGTTGTACCGTCTACTTGAC- |
| | | TTTTTTTTcagccaactccaaTTTTTTTT- |
| | | GTCAAGTAGACGGTACAACGACGG |
| SOX6 | 930 | -GTTTGTTCTACCTA-GTTTTAGAGCTA- |
| | | CCGTCGTTGTACCGTCTACTTGAC- |
| | | TTTTTTTTcagccaactccaaTTTTTTTT- |
| | | GTCAAGTAGACGGTACAACGACGG |
| SOX6 | 931 | -GAGCAAAACAATTT-GTTTTAGAGCTA- |
| | | CCGTCGTTGTACCGTCTACTTGAC- |
| | | TTTTTTTTcagccaactccaaTTTTTTTT- |
| | | GTCAAGTAGACGGTACAACGACGG |
| SOX6 | 932 | g-TAAATGTGCCTGAC-GTTTTAGAGCTA- |
| | | CCGTCGTTGTACCGTCTACTTGAC- |
| | | TTTTTTTTcagccaactccaaTTTTTTTT- |
| | | GTCAAGTAGACGGTACAACGACGG |
| SOX6 | 933 | g-TGATGTTGCACGAC-GTTTTAGAGCTA- |
| | | CCGTCGTTGTACCGTCTACTTGAC- |
| | | TTTTTTTTcagccaactccaaTTTTTTTT- |
| | | GTCAAGTAGACGGTACAACGACGG |
| SOX6 | 934 | g-TGAAGCAACTACTA-GTTTTAGAGCTA- |
| | | CCGTCGTTGTACCGTCTACTTGAC- |
| | | TTTTTTTTcagccaactccaaTTTTTTTT- |
| | | GTCAAGTAGACGGTACAACGACGG |
| SOX6 | 935 | g-ATCGGCGAGACCAG-GTTTTAGAGCTA- |
| | | CCGTCGTTGTACCGTCTACTTGAC- |
| | | TTTTTTTTcagccaactccaaTTTTTTTT- |
| | | GTCAAGTAGACGGTACAACGACGG |
| SOX6 | 936 | g-TGAGACAAGAGGCG-GTTTTAGAGCTA- |
| | | CCGTCGTTGTACCGTCTACTTGAC- |
| | | TTTTTTTTcagccaactccaaTTTTTTTT- |
| | | GTCAAGTAGACGGTACAACGACGG |
| SOX6 | 937 | g-CCAAATGCAAGGAT-GTTTTAGAGCTA- |
| | | CCTTCCCGACTTCCGTAGGAGCGC- |
| | | TTTTTTTTcagccaactccaaTTTTTTTT- |
| | | GCGCTCCTACGGAAGTCGGGAAGG |
| SOX6 | 938 | g-CCAATCCTTGCATT-GTTTTAGAGCTA- |
| | | CCTTCCCGACTTCCGTAGGAGCGC- |
| | | TTTTTTTTcagccaactccaaTTTTTTTT- |
| | | GCGCTCCTACGGAAGTCGGGAAGG |
| SOX6 | 939 | -GTGATAGTTAGCAA-GTTTTAGAGCTA- |
| | | CCTTCCCGACTTCCGTAGGAGCGC- |
| | | TTTTTTTTcagccaactccaaTTTTTTTT- |
| | | GCGCTCCTACGGAAGTCGGGAAGG |
| SOX6 | 940 | g-TGAAAAAGAACTCC-GTTTTAGAGCTA- |
| | | CCTTCCCGACTTCCGTAGGAGCGC- |
| | | TTTTTTTTcagccaactccaaTTTTTTTT- |
| | | GCGCTCCTACGGAAGTCGGGAAGG |
| SOX6 | 941 | g-ATAAGCTCAAAAGC-GTTTTAGAGCTA- |
| | | CCTTCCCGACTTCCGTAGGAGCGC- |
| | | TTTTTTTTcagccaactccaaTTTTTTTT- |
| | | GCGCTCCTACGGAAGTCGGGAAGG |
| SOX6 | 942 | g-AGTTGGAGTTACTA-GTTTTAGAGCTA- |
| | | CCTTCCCGACTTCCGTAGGAGCGC- |
| | | TTTTTTTTcagccaactccaaTTTTTTTT- |
| | | GCGCTCCTACGGAAGTCGGGAAGG |
| SOX6 | 943 | g-TTCAAGGACATGAA-GTTTTAGAGCTA- |
| | | CCTTCCCGACTTCCGTAGGAGCGC- |
| | | TTTTTTTTcagccaactccaaTTTTTTTT- |
| | | GCGCTCCTACGGAAGTCGGGAAGG |
| SOX6 | 944 | g-AACTACACTCAGTT-GTTTTAGAGCTA- |
| | | CCTTCCCGACTTCCGTAGGAGCGC- |
| | | TTTTTTTTcagccaactccaaTTTTTTTT- |
| | | GCGCTCCTACGGAAGTCGGGAAGG |
| SOX6 | 945 | -GGGTTCCACGCCTT-GTTTTAGAGCTA- |
| | | CCTTCCCGACTTCCGTAGGAGCGC- |
| | | TTTTTTTTcagccaactccaaTTTTTTTT- |
| | | GCGCTCCTACGGAAGTCGGGAAGG |
| SOX6 | 946 | -GTTTGTTCTACCTA-GTTTTAGAGCTA- |
| | | CCTTCCCGACTTCCGTAGGAGCGC- |
| | | TTTTTTTTcagccaactccaaTTTTTTTT- |
| | | GCGCTCCTACGGAAGTCGGGAAGG |
| SOX6 | 947 | -GAGCAAAACAATTT-GTTTTAGAGCTA- |
| | | CCTTCCCGACTTCCGTAGGAGCGC- |
| | | TTTTTTTTcagccaactccaaTTTTTTTT- |
| | | GCGCTCCTACGGAAGTCGGGAAGG |
| SOX6 | 948 | g-TAAATGTGCCTGAC-GTTTTAGAGCTA- |
| | | CCTTCCCGACTTCCGTAGGAGCGC- |
| | | TTTTTTTTcagccaactccaaTTTTTTTT- |
| | | GCGCTCCTACGGAAGTCGGGAAGG |
| SOX6 | 949 | g-TGATGTTGCACGAC-GTTTTAGAGCTA- |
| | | CCTTCCCGACTTCCGTAGGAGCGC- |
| | | TTTTTTTTcagccaactccaaTTTTTTTT- |
| | | GCGCTCCTACGGAAGTCGGGAAGG |
| SOX6 | 950 | g-TGAAGCAACTACTA-GTTTTAGAGCTA- |
| | | CCTTCCCGACTTCCGTAGGAGCGC- |
| | | TTTTTTTTcagccaactccaaTTTTTTTT- |
| | | GCGCTCCTACGGAAGTCGGGAAGG |
| SOX6 | 951 | g-ATCGGCGAGACCAG-GTTTTAGAGCTA- |
| | | CCTTCCCGACTTCCGTAGGAGCGC- |
| | | TTTTTTTTcagccaactccaaTTTTTTTT- |
| | | GCGCTCCTACGGAAGTCGGGAAGG |
| SOX6 | 952 | g-TGAGACAAGAGGCG-GTTTTAGAGCTA- |
| | | CCTTCCCGACTTCCGTAGGAGCGC- |
| | | TTTTTTTTcagccaactccaaTTTTTTTT- |
| | | GCGCTCCTACGGAAGTCGGGAAGG |
| SOX6 | 953 | g-CCAAATGCAAGGAT-GTTTTAGAGCTA- |
| | | CCTGAAGGTAAAGATCGGGTCCTC- |
| | | TTTTTTTTcagccaactccaaTTTTTTTT- |
| | | GAGGACCCGATCTTTACCTTCAGG |
| SOX6 | 954 | g-CCAATCCTTGCATT-GTTTTAGAGCTA- |
| | | CCTGAAGGTAAAGATCGGGTCCTC- |
| | | TTTTTTTTcagccaactccaaTTTTTTTT- |
| | | GAGGACCCGATCTTTACCTTCAGG |
| SOX6 | 955 | -GTGATAGTTAGCAA-GTTTTAGAGCTA- |
| | | CCTGAAGGTAAAGATCGGGTCCTC- |
| | | TTTTTTTTcagccaactccaaTTTTTTTT- |
| | | GAGGACCCGATCTTTACCTTCAGG |
| SOX6 | 956 | g-TGAAAAAGAACTCC-GTTTTAGAGCTA- |
| | | CCTGAAGGTAAAGATCGGGTCCTC- |
| | | TTTTTTTTcagccaactccaaTTTTTTTT- |
| | | GAGGACCCGATCTTTACCTTCAGG |
| SOX6 | 957 | g-ATAAGCTCAAAAGC-GTTTTAGAGCTA- |
| | | CCTGAAGGTAAAGATCGGGTCCTC- |
| | | TTTTTTTTcagccaactccaaTTTTTTTT- |
| | | GAGGACCCGATCTTTACCTTCAGG |
| SOX6 | 958 | g-AGTTGGAGTTACTA-GTTTTAGAGCTA- |
| | | CCTGAAGGTAAAGATCGGGTCCTC- |
| | | TTTTTTTTcagccaactccaaTTTTTTTT- |
| | | GAGGACCCGATCTTTACCTTCAGG |
| SOX6 | 959 | g-TTCAAGGACATGAA-GTTTTAGAGCTA- |
| | | CCTGAAGGTAAAGATCGGGTCCTC- |
| | | TTTTTTTTcagccaactccaaTTTTTTTT- |
| | | GAGGACCCGATCTTTACCTTCAGG |
| SOX6 | 960 | g-AACTACACTCAGTT-GTTTTAGAGCTA- |
| | | CCTGAAGGTAAAGATCGGGTCCTC- |
| | | TTTTTTTTcagccaactccaaTTTTTTTT- |
| | | GAGGACCCGATCTTTACCTTCAGG |
| SOX6 | 961 | -GGGTTCCACGCCTT-GTTTTAGAGCTA- |
| | | CCTGAAGGTAAAGATCGGGTCCTC- |
| | | TTTTTTTTcagccaactccaaTTTTTTTT- |
| | | GAGGACCCGATCTTTACCTTCAGG |
| SOX6 | 962 | -GTTTGTTCTACCTA-GTTTTAGAGCTA- |
| | | CCTGAAGGTAAAGATCGGGTCCTC- |
| | | TTTTTTTTcagccaactccaaTTTTTTTT- |
| | | GAGGACCCGATCTTTACCTTCAGG |
| SOX6 | 963 | -GAGCAAAACAATTT-GTTTTAGAGCTA- |
| | | CCTGAAGGTAAAGATCGGGTCCTC- |
| | | TTTTTTTTcagccaactccaaTTTTTTTT- |
| | | GAGGACCCGATCTTTACCTTCAGG |
| SOX6 | 964 | g-TAAATGTGCCTGAC-GTTTTAGAGCTA- |
| | | CCTGAAGGTAAAGATCGGGTCCTC- |
| | | TTTTTTTTcagccaactccaaTTTTTTTT- |
| | | GAGGACCCGATCTTTACCTTCAGG |
| SOX6 | 965 | g-TGATGTTGCACGAC-GTTTTAGAGCTA- |
| | | CCTGAAGGTAAAGATCGGGTCCTC- |
| | | TTTTTTTTcagccaactccaaTTTTTTTT- |
| | | GAGGACCCGATCTTTACCTTCAGG |
| SOX6 | 966 | g-TGAAGCAACTACTA-GTTTTAGAGCTA- |
| | | CCTGAAGGTAAAGATCGGGTCCTC- |
| | | TTTTTTTTcagccaactccaaTTTTTTTT- |
| | | GAGGACCCGATCTTTACCTTCAGG |
| SOX6 | 967 | g-ATCGGCGAGACCAG-GTTTTAGAGCTA- |
| | | CCTGAAGGTAAAGATCGGGTCCTC- |
| | | TTTTTTTTcagccaactccaaTTTTTTTT- |
| | | GAGGACCCGATCTTTACCTTCAGG |
| SOX6 | 968 | g-TGAGACAAGAGGCG-GTTTTAGAGCTA- |
| | | CCTGAAGGTAAAGATCGGGTCCTC- |
| | | TTTTTTTTcagccaactccaaTTTTTTTT- |
| | | GAGGACCCGATCTTTACCTTCAGG |
| SOX6 | 969 | g-CCAAATGCAAGGAT-GTTTTAGAGCTA- |
| | | CCTGGTTATAGCGGACGCACTGT- |
| | | TTTTTTTTcagccaactccaaTTTTTTTT- |
| | | ACAGTGCGTCCGCTATAACCAGG |
| SOX6 | 970 | g-CCAATCCTTGCATT-GTTTTAGAGCTA- |
| | | CCTGGTTATAGCGGACGCACTGT- |
| | | TTTTTTTTcagccaactccaaTTTTTTTT- |
| | | ACAGTGCGTCCGCTATAACCAGG |
| SOX6 | 971 | -GTGATAGTTAGCAA-GTTTTAGAGCTA- |
| | | CCTGGTTATAGCGGACGCACTGT- |
| | | TTTTTTTTcagccaactccaaTTTTTTTT- |
| | | ACAGTGCGTCCGCTATAACCAGG |
| SOX6 | 972 | g-TGAAAAAGAACTCC-GTTTTAGAGCTA- |
| | | CCTGGTTATAGCGGACGCACTGT- |
| | | TTTTTTTTcagccaactccaaTTTTTTTT- |
| | | ACAGTGCGTCCGCTATAACCAGG |
| SOX6 | 973 | g-ATAAGCTCAAAAGC-GTTTTAGAGCTA- |
| | | CCTGGTTATAGCGGACGCACTGT- |
| | | TTTTTTTTcagccaactccaaTTTTTTTT- |
| | | ACAGTGCGTCCGCTATAACCAGG |
| SOX6 | 974 | g-AGTTGGAGTTACTA-GTTTTAGAGCTA- |
| | | CCTGGTTATAGCGGACGCACTGT- |
| | | TTTTTTTTcagccaactccaaTTTTTTTT- |
| | | ACAGTGCGTCCGCTATAACCAGG |
| SOX6 | 975 | g-TTCAAGGACATGAA-GTTTTAGAGCTA- |
| | | CCTGGTTATAGCGGACGCACTGT- |
| | | TTTTTTTTcagccaactccaaTTTTTTTT- |
| | | ACAGTGCGTCCGCTATAACCAGG |
| SOX6 | 976 | g-AACTACACTCAGTT-GTTTTAGAGCTA- |
| | | CCTGGTTATAGCGGACGCACTGT- |
| | | TTTTTTTTcagccaactccaaTTTTTTTT- |
| | | ACAGTGCGTCCGCTATAACCAGG |
| SOX6 | 977 | -GGGTTCCACGCCTT-GTTTTAGAGCTA- |
| | | CCTGGTTATAGCGGACGCACTGT- |
| | | TTTTTTTTcagccaactccaaTTTTTTTT- |
| | | ACAGTGCGTCCGCTATAACCAGG |
| SOX6 | 978 | -GTTTGTTCTACCTA-GTTTTAGAGCTA- |
| | | CCTGGTTATAGCGGACGCACTGT- |
| | | TTTTTTTTcagccaactccaaTTTTTTTT- |
| | | ACAGTGCGTCCGCTATAACCAGG |
| SOX6 | 979 | -GAGCAAAACAATTT-GTTTTAGAGCTA- |
| | | CCTGGTTATAGCGGACGCACTGT- |
| | | TTTTTTTTcagccaactccaaTTTTTTTT- |
| | | ACAGTGCGTCCGCTATAACCAGG |
| SOX6 | 980 | g-TAAATGTGCCTGAC-GTTTTAGAGCTA- |
| | | CCTGGTTATAGCGGACGCACTGT- |
| | | TTTTTTTTcagccaactccaaTTTTTTTT- |
| | | ACAGTGCGTCCGCTATAACCAGG |
| SOX6 | 981 | g-TGATGTTGCACGAC-GTTTTAGAGCTA- |
| | | CCTGGTTATAGCGGACGCACTGT- |
| | | TTTTTTTTcagccaactccaaTTTTTTTT- |
| | | ACAGTGCGTCCGCTATAACCAGG |
| SOX6 | 982 | g-TGAAGCAACTACTA-GTTTTAGAGCTA- |
| | | CCTGGTTATAGCGGACGCACTGT- |
| | | TTTTTTTTcagccaactccaaTTTTTTTT- |
| | | ACAGTGCGTCCGCTATAACCAGG |
| SOX6 | 983 | g-ATCGGCGAGACCAG-GTTTTAGAGCTA- |
| | | CCTGGTTATAGCGGACGCACTGT- |
| | | TTTTTTTTcagccaactccaaTTTTTTTT- |
| | | ACAGTGCGTCCGCTATAACCAGG |
| SOX6 | 984 | g-TGAGACAAGAGGCG-GTTTTAGAGCTA- |
| | | CCTGGTTATAGCGGACGCACTGT- |
| | | TTTTTTTTcagccaactccaaTTTTTTTT- |
| | | ACAGTGCGTCCGCTATAACCAGG |
| SOX6 | 985 | g-CCAAATGCAAGGAT-GTTTTAGAGCTA- |
| | | CCGCATCGTATTATCTGCGAAGC- |
| | | TTTTTTTTcagccaactccaaTTTTTTTT- |
| | | GCTTCGCAGATAATACGATGCGG |
| SOX6 | 986 | g-CCAATCCTTGCATT-GTTTTAGAGCTA- |
| | | CCGCATCGTATTATCTGCGAAGC- |
| | | TTTTTTTTcagccaactccaaTTTTTTTT- |
| | | GCTTCGCAGATAATACGATGCGG |
| SOX6 | 987 | -GTGATAGTTAGCAA-GTTTTAGAGCTA- |
| | | CCGCATCGTATTATCTGCGAAGC- |
| | | TTTTTTTTcagccaactccaaTTTTTTTT- |
| | | GCTTCGCAGATAATACGATGCGG |
| SOX6 | 988 | g-TGAAAAAGAACTCC-GTTTTAGAGCTA- |
| | | CCGCATCGTATTATCTGCGAAGC- |
| | | TTTTTTTTcagccaactccaaTTTTTTTT- |
| | | GCTTCGCAGATAATACGATGCGG |
| SOX6 | 989 | g-ATAAGCTCAAAAGC-GTTTTAGAGCTA- |
| | | CCGCATCGTATTATCTGCGAAGC- |
| | | TTTTTTTTcagccaactccaaTTTTTTTT- |
| | | GCTTCGCAGATAATACGATGCGG |
| SOX6 | 990 | g-AGTTGGAGTTACTA-GTTTTAGAGCTA- |
| | | CCGCATCGTATTATCTGCGAAGC- |
| | | TTTTTTTTcagccaactccaaTTTTTTTT- |
| | | GCTTCGCAGATAATACGATGCGG |
| SOX6 | 991 | g-TTCAAGGACATGAA-GTTTTAGAGCTA- |
| | | CCGCATCGTATTATCTGCGAAGC- |
| | | TTTTTTTTcagccaactccaaTTTTTTTT- |
| | | GCTTCGCAGATAATACGATGCGG |
| SOX6 | 992 | g-AACTACACTCAGTT-GTTTTAGAGCTA- |
| | | CCGCATCGTATTATCTGCGAAGC- |
| | | TTTTTTTTcagccaactccaaTTTTTTTT- |
| | | GCTTCGCAGATAATACGATGCGG |
| SOX6 | 993 | -GGGTTCCACGCCTT-GTTTTAGAGCTA- |
| | | CCGCATCGTATTATCTGCGAAGC- |
| | | TTTTTTTTcagccaactccaaTTTTTTTT- |
| | | GCTTCGCAGATAATACGATGCGG |
| SOX6 | 994 | -GTTTGTTCTACCTA-GTTTTAGAGCTA- |
| | | CCGCATCGTATTATCTGCGAAGC- |
| | | TTTTTTTTcagccaactccaaTTTTTTTT- |
| | | GCTTCGCAGATAATACGATGCGG |
| SOX6 | 995 | -GAGCAAAACAATTT-GTTTTAGAGCTA- |
| | | CCGCATCGTATTATCTGCGAAGC- |
| | | TTTTTTTTcagccaactccaaTTTTTTTT- |
| | | GCTTCGCAGATAATACGATGCGG |
| SOX6 | 996 | g-TAAATGTGCCTGAC-GTTTTAGAGCTA- |
| | | CCGCATCGTATTATCTGCGAAGC- |
| | | TTTTTTTTcagccaactccaaTTTTTTTT- |
| | | GCTTCGCAGATAATACGATGCGG |
| SOX6 | 997 | g-TGATGTTGCACGAC-GTTTTAGAGCTA- |
| | | CCGCATCGTATTATCTGCGAAGC- |
| | | TTTTTTTTcagccaactccaaTTTTTTTT- |
| | | GCTTCGCAGATAATACGATGCGG |
| SOX6 | 998 | g-TGAAGCAACTACTA-GTTTTAGAGCTA- |
| | | CCGCATCGTATTATCTGCGAAGC- |
| | | TTTTTTTTcagccaactccaaTTTTTTTT- |
| | | GCTTCGCAGATAATACGATGCGG |
| SOX6 | 999 | g-ATCGGCGAGACCAG-GTTTTAGAGCTA- |
| | | CCGCATCGTATTATCTGCGAAGC- |
| | | TTTTTTTTcagccaactccaaTTTTTTTT- |
| | | GCTTCGCAGATAATACGATGCGG |
| SOX6 | 1000 | g-TGAGACAAGAGGCG-GTTTTAGAGCTA- |
| | | CCGCATCGTATTATCTGCGAAGC- |
| | | TTTTTTTTcagccaactccaaTTTTTTTT- |
| | | GCTTCGCAGATAATACGATGCGG |
| SOX6 | 1001 | g-CCAAATGCAAGGAT-GTTTTAGAGCTA- |
| | | CCGCTAGGACGTTCAACGGAGTC- |
| | | TTTTTTTTcagccaactccaaTTTTTTTT- |
| | | GACTCCGTTGAACGTCCTAGCGG |
| SOX6 | 1002 | g-CCAATCCTTGCATT-GTTTTAGAGCTA- |
| | | CCGCTAGGACGTTCAACGGAGTC- |
| | | TTTTTTTTcagccaactccaaTTTTTTTT- |
| | | GACTCCGTTGAACGTCCTAGCGG |
| SOX6 | 1003 | -GTGATAGTTAGCAA-GTTTTAGAGCTA- |
| | | CCGCTAGGACGTTCAACGGAGTC- |
| | | TTTTTTTTcagccaactccaaTTTTTTTT- |
| | | GACTCCGTTGAACGTCCTAGCGG |
| SOX6 | 1004 | g-TGAAAAAGAACTCC-GTTTTAGAGCTA- |
| | | CCGCTAGGACGTTCAACGGAGTC- |
| | | TTTTTTTTcagccaactccaaTTTTTTTT- |
| | | GACTCCGTTGAACGTCCTAGCGG |
| SOX6 | 1005 | g-ATAAGCTCAAAAGC-GTTTTAGAGCTA- |
| | | CCGCTAGGACGTTCAACGGAGTC- |
| | | TTTTTTTTcagccaactccaaTTTTTTTT- |
| | | GACTCCGTTGAACGTCCTAGCGG |
| SOX6 | 1006 | g-AGTTGGAGTTACTA-GTTTTAGAGCTA- |
| | | CCGCTAGGACGTTCAACGGAGTC- |
| | | TTTTTTTTcagccaactccaaTTTTTTTT- |
| | | GACTCCGTTGAACGTCCTAGCGG |
| SOX6 | 1007 | g-TTCAAGGACATGAA-GTTTTAGAGCTA- |
| | | CCGCTAGGACGTTCAACGGAGTC- |
| | | TTTTTTTTcagccaactccaaTTTTTTTT- |
| | | GACTCCGTTGAACGTCCTAGCGG |
| SOX6 | 1008 | g-AACTACACTCAGTT-GTTTTAGAGCTA- |
| | | CCGCTAGGACGTTCAACGGAGTC- |
| | | TTTTTTTTcagccaactccaaTTTTTTTT- |
| | | GACTCCGTTGAACGTCCTAGCGG |
| SOX6 | 1009 | -GGGTTCCACGCCTT-GTTTTAGAGCTA- |
| | | CCGCTAGGACGTTCAACGGAGTC- |
| | | TTTTTTTTcagccaactccaaTTTTTTTT- |
| | | GACTCCGTTGAACGTCCTAGCGG |
| SOX6 | 1010 | -GTTTGTTCTACCTA-GTTTTAGAGCTA- |
| | | CCGCTAGGACGTTCAACGGAGTC- |
| | | TTTTTTTTcagccaactccaaTTTTTTTT- |
| | | GACTCCGTTGAACGTCCTAGCGG |
| SOX6 | 1011 | -GAGCAAAACAATTT-GTTTTAGAGCTA- |
| | | CCGCTAGGACGTTCAACGGAGTC- |
| | | TTTTTTTTcagccaactccaaTTTTTTTT- |
| | | GACTCCGTTGAACGTCCTAGCGG |
| SOX6 | 1012 | g-TAAATGTGCCTGAC-GTTTTAGAGCTA- |
| | | CCGCTAGGACGTTCAACGGAGTC- |
| | | TTTTTTTTcagccaactccaaTTTTTTTT- |
| | | GACTCCGTTGAACGTCCTAGCGG |
| SOX6 | 1013 | g-TGATGTTGCACGAC-GTTTTAGAGCTA- |
| | | CCGCTAGGACGTTCAACGGAGTC- |
| | | TTTTTTTTcagccaactccaaTTTTTTTT- |
| | | GACTCCGTTGAACGTCCTAGCGG |
| SOX6 | 1014 | g-TGAAGCAACTACTA-GTTTTAGAGCTA- |
| | | CCGCTAGGACGTTCAACGGAGTC- |
| | | TTTTTTTTcagccaactccaaTTTTTTTT- |
| | | GACTCCGTTGAACGTCCTAGCGG |
| SOX6 | 1015 | g-ATCGGCGAGACCAG-GTTTTAGAGCTA- |
| | | CCGCTAGGACGTTCAACGGAGTC- |
| | | TTTTTTTTcagccaactccaaTTTTTTTT- |
| | | GACTCCGTTGAACGTCCTAGCGG |
| SOX6 | 1016 | g-TGAGACAAGAGGCG-GTTTTAGAGCTA- |
| | | CCGCTAGGACGTTCAACGGAGTC- |
| | | TTTTTTTTcagccaactccaaTTTTTTTT- |
| | | GACTCCGTTGAACGTCCTAGCGG |
| SOX6 | 1017 | g-CCAAATGCAAGGAT-GTTTTAGAGCTA- |
| | | CCATAGCGGTACTATCGGCATCT- |
| | | TTTTTTTTcagccaactccaaTTTTTTTT- |
| | | AGATGCCGATAGTACCGCTATGG |
| SOX6 | 1018 | g-CCAATCCTTGCATT-GTTTTAGAGCTA- |
| | | CCATAGCGGTACTATCGGCATCT- |
| | | TTTTTTTTcagccaactccaaTTTTTTTT- |
| | | AGATGCCGATAGTACCGCTATGG |
| SOX6 | 1019 | -GTGATAGTTAGCAA-GTTTTAGAGCTA- |
| | | CCATAGCGGTACTATCGGCATCT- |
| | | TTTTTTTTcagccaactccaaTTTTTTTT- |
| | | AGATGCCGATAGTACCGCTATGG |
| SOX6 | 1020 | g-TGAAAAAGAACTCC-GTTTTAGAGCTA- |
| | | CCATAGCGGTACTATCGGCATCT- |
| | | TTTTTTTTcagccaactccaaTTTTTTTT- |
| | | AGATGCCGATAGTACCGCTATGG |
| SOX6 | 1021 | g-ATAAGCTCAAAAGC-GTTTTAGAGCTA- |
| | | CCATAGCGGTACTATCGGCATCT- |
| | | TTTTTTTTcagccaactccaaTTTTTTTT- |
| | | AGATGCCGATAGTACCGCTATGG |
| SOX6 | 1022 | g-AGTTGGAGTTACTA-GTTTTAGAGCTA- |
| | | CCATAGCGGTACTATCGGCATCT- |
| | | TTTTTTTTcagccaactccaaTTTTTTTT- |
| | | AGATGCCGATAGTACCGCTATGG |
| SOX6 | 1023 | g-TTCAAGGACATGAA-GTTTTAGAGCTA- |
| | | CCATAGCGGTACTATCGGCATCT- |
| | | TTTTTTTTcagccaactccaaTTTTTTTT- |
| | | AGATGCCGATAGTACCGCTATGG |
| SOX6 | 1024 | g-AACTACACTCAGTT-GTTTTAGAGCTA- |
| | | CCATAGCGGTACTATCGGCATCT- |
| | | TTTTTTTTcagccaactccaaTTTTTTTT- |
| | | AGATGCCGATAGTACCGCTATGG |
| SOX6 | 1025 | -GGGTTCCACGCCTT-GTTTTAGAGCTA- |
| | | CCATAGCGGTACTATCGGCATCT- |
| | | TTTTTTTTcagccaactccaaTTTTTTTT- |
| | | AGATGCCGATAGTACCGCTATGG |
| SOX6 | 1026 | -GTTTGTTCTACCTA-GTTTTAGAGCTA- |
| | | CCATAGCGGTACTATCGGCATCT- |
| | | TTTTTTTTcagccaactccaaTTTTTTTT- |
| | | AGATGCCGATAGTACCGCTATGG |
| SOX6 | 1027 | -GAGCAAAACAATTT-GTTTTAGAGCTA- |
| | | CCATAGCGGTACTATCGGCATCT- |
| | | TTTTTTTTcagccaactccaaTTTTTTTT- |
| | | AGATGCCGATAGTACCGCTATGG |
| SOX6 | 1028 | g-TAAATGTGCCTGAC-GTTTTAGAGCTA- |
| | | CCATAGCGGTACTATCGGCATCT- |
| | | TTTTTTTTcagccaactccaaTTTTTTTT- |
| | | AGATGCCGATAGTACCGCTATGG |
| SOX6 | 1029 | g-TGATGTTGCACGAC-GTTTTAGAGCTA- |
| | | CCATAGCGGTACTATCGGCATCT- |
| | | TTTTTTTTcagccaactccaaTTTTTTTT- |
| | | AGATGCCGATAGTACCGCTATGG |
| SOX6 | 1030 | g-TGAAGCAACTACTA-GTTTTAGAGCTA- |
| | | CCATAGCGGTACTATCGGCATCT- |
| | | TTTTTTTTcagccaactccaaTTTTTTTT- |
| | | AGATGCCGATAGTACCGCTATGG |
| SOX6 | 1031 | g-ATCGGCGAGACCAG-GTTTTAGAGCTA- |
| | | CCATAGCGGTACTATCGGCATCT- |
| | | TTTTTTTTcagccaactccaaTTTTTTTT- |
| | | AGATGCCGATAGTACCGCTATGG |
| SOX6 | 1032 | g-TGAGACAAGAGGCG-GTTTTAGAGCTA- |
| | | CCATAGCGGTACTATCGGCATCT- |
| | | TTTTTTTTcagccaactccaaTTTTTTTT- |
| | | AGATGCCGATAGTACCGCTATGG |
| SOX6 | 1033 | g-CCAAATGCAAGGAT-GTTTTAGAGCTA- |
| | | CCTCGTACTAGTCTCGCATGACC- |
| | | TTTTTTTTcagccaactccaaTTTTTTTT- |
| | | GGTCATGCGAGACTAGTACGAGG |
| SOX6 | 1034 | g-CCAATCCTTGCATT-GTTTTAGAGCTA- |
| | | CCTCGTACTAGTCTCGCATGACC- |
| | | TTTTTTTTcagccaactccaaTTTTTTTT- |
| | | GGTCATGCGAGACTAGTACGAGG |
| SOX6 | 1035 | -GTGATAGTTAGCAA-GTTTTAGAGCTA- |
| | | CCTCGTACTAGTCTCGCATGACC- |
| | | TTTTTTTTcagccaactccaaTTTTTTTT- |
| | | GGTCATGCGAGACTAGTACGAGG |
| SOX6 | 1036 | g-TGAAAAAGAACTCC-GTTTTAGAGCTA- |
| | | CCTCGTACTAGTCTCGCATGACC- |
| | | TTTTTTTTcagccaactccaaTTTTTTTT- |
| | | GGTCATGCGAGACTAGTACGAGG |
| SOX6 | 1037 | g-ATAAGCTCAAAAGC-GTTTTAGAGCTA- |
| | | CCTCGTACTAGTCTCGCATGACC- |
| | | TTTTTTTTcagccaactccaaTTTTTTTT- |
| | | GGTCATGCGAGACTAGTACGAGG |
| SOX6 | 1038 | g-AGTTGGAGTTACTA-GTTTTAGAGCTA- |
| | | CCTCGTACTAGTCTCGCATGACC- |
| | | TTTTTTTTcagccaactccaaTTTTTTTT- |
| | | GGTCATGCGAGACTAGTACGAGG |
| SOX6 | 1039 | g-TTCAAGGACATGAA-GTTTTAGAGCTA- |
| | | CCTCGTACTAGTCTCGCATGACC- |
| | | TTTTTTTTcagccaactccaaTTTTTTTT- |
| | | GGTCATGCGAGACTAGTACGAGG |
| SOX6 | 1040 | g-AACTACACTCAGTT-GTTTTAGAGCTA- |
| | | CCTCGTACTAGTCTCGCATGACC- |
| | | TTTTTTTTcagccaactccaaTTTTTTTT- |
| | | GGTCATGCGAGACTAGTACGAGG |
| SOX6 | 1041 | -GGGTTCCACGCCTT-GTTTTAGAGCTA- |
| | | CCTCGTACTAGTCTCGCATGACC- |
| | | TTTTTTTTcagccaactccaaTTTTTTTT- |
| | | GGTCATGCGAGACTAGTACGAGG |
| SOX6 | 1042 | -GTTTGTTCTACCTA-GTTTTAGAGCTA- |
| | | CCTCGTACTAGTCTCGCATGACC- |
| | | TTTTTTTTcagccaactccaaTTTTTTTT- |
| | | GGTCATGCGAGACTAGTACGAGG |
| SOX6 | 1043 | -GAGCAAAACAATTT-GTTTTAGAGCTA- |
| | | CCTCGTACTAGTCTCGCATGACC- |
| | | TTTTTTTTcagccaactccaaTTTTTTTT- |
| | | GGTCATGCGAGACTAGTACGAGG |
| SOX6 | 1044 | g-TAAATGTGCCTGAC-GTTTTAGAGCTA- |
| | | CCTCGTACTAGTCTCGCATGACC- |
| | | TTTTTTTTcagccaactccaaTTTTTTTT- |
| | | GGTCATGCGAGACTAGTACGAGG |
| SOX6 | 1045 | g-TGATGTTGCACGAC-GTTTTAGAGCTA- |
| | | CCTCGTACTAGTCTCGCATGACC- |
| | | TTTTTTTTcagccaactccaaTTTTTTTT- |
| | | GGTCATGCGAGACTAGTACGAGG |
| SOX6 | 1046 | g-TGAAGCAACTACTA-GTTTTAGAGCTA- |
| | | CCTCGTACTAGTCTCGCATGACC- |
| | | TTTTTTTTcagccaactccaaTTTTTTTT- |
| | | GGTCATGCGAGACTAGTACGAGG |
| SOX6 | 1047 | g-ATCGGCGAGACCAG-GTTTTAGAGCTA- |
| | | CCTCGTACTAGTCTCGCATGACC- |
| | | TTTTTTTTcagccaactccaaTTTTTTTT- |
| | | GGTCATGCGAGACTAGTACGAGG |
| SOX6 | 1048 | g-TGAGACAAGAGGCG-GTTTTAGAGCTA- |
| | | CCTCGTACTAGTCTCGCATGACC- |
| | | TTTTTTTTcagccaactccaaTTTTTTTT- |
| | | GGTCATGCGAGACTAGTACGAGG |
| SOX6 | 1049 | g-CCAAATGCAAGGAT-GTTTTAGAGCTA- |
| | | CCGATAGTGCTAAACGACGCTTT- |
| | | TTTTTTTTcagccaactccaaTTTTTTTT- |
| | | AAAGCGTCGTTTAGCACTATCGG |
| SOX6 | 1050 | g-CCAATCCTTGCATT-GTTTTAGAGCTA- |
| | | CCGATAGTGCTAAACGACGCTTT- |
| | | TTTTTTTTcagccaactccaaTTTTTTTT- |
| | | AAAGCGTCGTTTAGCACTATCGG |
| SOX6 | 1051 | -GTGATAGTTAGCAA-GTTTTAGAGCTA- |
| | | CCGATAGTGCTAAACGACGCTTT- |
| | | TTTTTTTTcagccaactccaaTTTTTTTT- |
| | | AAAGCGTCGTTTAGCACTATCGG |
| SOX6 | 1052 | g-TGAAAAAGAACTCC-GTTTTAGAGCTA- |
| | | CCGATAGTGCTAAACGACGCTTT- |
| | | TTTTTTTTcagccaactccaaTTTTTTTT- |
| | | AAAGCGTCGTTTAGCACTATCGG |
| SOX6 | 1053 | g-ATAAGCTCAAAAGC-GTTTTAGAGCTA- |
| | | CCGATAGTGCTAAACGACGCTTT- |
| | | TTTTTTTTcagccaactccaaTTTTTTTT- |
| | | AAAGCGTCGTTTAGCACTATCGG |
| SOX6 | 1054 | g-AGTTGGAGTTACTA-GTTTTAGAGCTA- |
| | | CCGATAGTGCTAAACGACGCTTT- |
| | | TTTTTTTTcagccaactccaaTTTTTTTT- |
| | | AAAGCGTCGTTTAGCACTATCGG |
| SOX6 | 1055 | g-TTCAAGGACATGAA-GTTTTAGAGCTA- |
| | | CCGATAGTGCTAAACGACGCTTT- |
| | | TTTTTTTTcagccaactccaaTTTTTTTT- |
| | | AAAGCGTCGTTTAGCACTATCGG |
| SOX6 | 1056 | g-AACTACACTCAGTT-GTTTTAGAGCTA- |
| | | CCGATAGTGCTAAACGACGCTTT- |
| | | TTTTTTTTcagccaactccaaTTTTTTTT- |
| | | AAAGCGTCGTTTAGCACTATCGG |
| SOX6 | 1057 | -GGGTTCCACGCCTT-GTTTTAGAGCTA- |
| | | CCGATAGTGCTAAACGACGCTTT- |
| | | TTTTTTTTcagccaactccaaTTTTTTTT- |
| | | AAAGCGTCGTTTAGCACTATCGG |
| SOX6 | 1058 | -GTTTGTTCTACCTA-GTTTTAGAGCTA- |
| | | CCGATAGTGCTAAACGACGCTTT- |
| | | TTTTTTTTcagccaactccaaTTTTTTTT- |
| | | AAAGCGTCGTTTAGCACTATCGG |
| SOX6 | 1059 | -GAGCAAAACAATTT-GTTTTAGAGCTA- |
| | | CCGATAGTGCTAAACGACGCTTT- |
| | | TTTTTTTTcagccaactccaaTTTTTTTT- |
| | | AAAGCGTCGTTTAGCACTATCGG |
| SOX6 | 1060 | g-TAAATGTGCCTGAC-GTTTTAGAGCTA- |
| | | CCGATAGTGCTAAACGACGCTTT- |
| | | TTTTTTTTcagccaactccaaTTTTTTTT- |
| | | AAAGCGTCGTTTAGCACTATCGG |
| SOX6 | 1061 | g-TGATGTTGCACGAC-GTTTTAGAGCTA- |
| | | CCGATAGTGCTAAACGACGCTTT- |
| | | TTTTTTTTcagccaactccaaTTTTTTTT- |
| | | AAAGCGTCGTTTAGCACTATCGG |
| SOX6 | 1062 | g-TGAAGCAACTACTA-GTTTTAGAGCTA- |
| | | CCGATAGTGCTAAACGACGCTTT- |
| | | TTTTTTTTcagccaactccaaTTTTTTTT- |
| | | AAAGCGTCGTTTAGCACTATCGG |
| SOX6 | 1063 | g-ATCGGCGAGACCAG-GTTTTAGAGCTA- |
| | | CCGATAGTGCTAAACGACGCTTT- |
| | | TTTTTTTTcagccaactccaaTTTTTTTT- |
| | | AAAGCGTCGTTTAGCACTATCGG |
| SOX6 | 1064 | g-TGAGACAAGAGGCG-GTTTTAGAGCTA- |
| | | CCGATAGTGCTAAACGACGCTTT- |
| | | TTTTTTTTcagccaactccaaTTTTTTTT- |
| | | AAAGCGTCGTTTAGCACTATCGG |
| SOX6 | 1065 | g-CCAAATGCAAGGAT-GTTTTAGAGCTA- |
| | | CCCGTTATCGACGTTCAAGGAAC- |
| | | TTTTTTTTcagccaactccaaTTTTTTTT- |
| | | GTTCCTTGAACGTCGATAACGGG |
| SOX6 | 1066 | g-CCAATCCTTGCATT-GTTTTAGAGCTA- |
| | | CCCGTTATCGACGTTCAAGGAAC- |
| | | TTTTTTTTcagccaactccaaTTTTTTTT- |
| | | GTTCCTTGAACGTCGATAACGGG |
| SOX6 | 1067 | -GTGATAGTTAGCAA-GTTTTAGAGCTA- |
| | | CCCGTTATCGACGTTCAAGGAAC- |
| | | TTTTTTTTcagccaactccaaTTTTTTTT- |
| | | GTTCCTTGAACGTCGATAACGGG |
| SOX6 | 1068 | g-TGAAAAAGAACTCC-GTTTTAGAGCTA- |
| | | CCCGTTATCGACGTTCAAGGAAC- |
| | | TTTTTTTTcagccaactccaaTTTTTTTT- |
| | | GTTCCTTGAACGTCGATAACGGG |
| SOX6 | 1069 | g-ATAAGCTCAAAAGC-GTTTTAGAGCTA- |
| | | CCCGTTATCGACGTTCAAGGAAC- |
| | | TTTTTTTTcagccaactccaaTTTTTTTT- |
| | | GTTCCTTGAACGTCGATAACGGG |
| SOX6 | 1070 | g-AGTTGGAGTTACTA-GTTTTAGAGCTA- |
| | | CCCGTTATCGACGTTCAAGGAAC- |
| | | TTTTTTTTcagccaactccaaTTTTTTTT- |
| | | GTTCCTTGAACGTCGATAACGGG |
| SOX6 | 1071 | g-TTCAAGGACATGAA-GTTTTAGAGCTA- |
| | | CCCGTTATCGACGTTCAAGGAAC- |
| | | TTTTTTTTcagccaactccaaTTTTTTTT- |
| | | GTTCCTTGAACGTCGATAACGGG |
| SOX6 | 1072 | g-AACTACACTCAGTT-GTTTTAGAGCTA- |
| | | CCCGTTATCGACGTTCAAGGAAC- |
| | | TTTTTTTTcagccaactccaaTTTTTTTT- |
| | | GTTCCTTGAACGTCGATAACGGG |
| SOX6 | 1073 | -GGGTTCCACGCCTT-GTTTTAGAGCTA- |
| | | CCCGTTATCGACGTTCAAGGAAC- |
| | | TTTTTTTTcagccaactccaaTTTTTTTT- |
| | | GTTCCTTGAACGTCGATAACGGG |
| SOX6 | 1074 | -GTTTGTTCTACCTA-GTTTTAGAGCTA- |
| | | CCCGTTATCGACGTTCAAGGAAC- |
| | | TTTTTTTTcagccaactccaaTTTTTTTT- |
| | | GTTCCTTGAACGTCGATAACGGG |
| SOX6 | 1075 | -GAGCAAAACAATTT-GTTTTAGAGCTA- |
| | | CCCGTTATCGACGTTCAAGGAAC- |
| | | TTTTTTTTcagccaactccaaTTTTTTTT- |
| | | GTTCCTTGAACGTCGATAACGGG |
| SOX6 | 1076 | g-TAAATGTGCCTGAC-GTTTTAGAGCTA- |
| | | CCCGTTATCGACGTTCAAGGAAC- |
| | | TTTTTTTTcagccaactccaaTTTTTTTT- |
| | | GTTCCTTGAACGTCGATAACGGG |
| SOX6 | 1077 | g-TGATGTTGCACGAC-GTTTTAGAGCTA- |
| | | CCCGTTATCGACGTTCAAGGAAC- |
| | | TTTTTTTTcagccaactccaaTTTTTTTT- |
| | | GTTCCTTGAACGTCGATAACGGG |
| SOX6 | 1078 | g-TGAAGCAACTACTA-GTTTTAGAGCTA- |
| | | CCCGTTATCGACGTTCAAGGAAC- |
| | | TTTTTTTTcagccaactccaaTTTTTTTT- |
| | | GTTCCTTGAACGTCGATAACGGG |
| SOX6 | 1079 | g-ATCGGCGAGACCAG-GTTTTAGAGCTA- |
| | | CCCGTTATCGACGTTCAAGGAAC- |
| | | TTTTTTTTcagccaactccaaTTTTTTTT- |
| | | GTTCCTTGAACGTCGATAACGGG |
| SOX6 | 1080 | g-TGAGACAAGAGGCG-GTTTTAGAGCTA- |
| | | CCCGTTATCGACGTTCAAGGAAC- |
| | | TTTTTTTTcagccaactccaaTTTTTTTT- |
| | | GTTCCTTGAACGTCGATAACGGG |
| SOX6 | 1081 | g-CCAAATGCAAGGAT-GTTTTAGAGCTA- |
| | | CCGATCAATGCGGTCTGCGTAAC- |
| | | TTTTTTTTcagccaactccaaTTTTTTTT- |
| | | GTTACGCAGACCGCATTGATCGG |
| SOX6 | 1082 | g-CCAATCCTTGCATT-GTTTTAGAGCTA- |
| | | CCGATCAATGCGGTCTGCGTAAC- |
| | | TTTTTTTTcagccaactccaaTTTTTTTT- |
| | | GTTACGCAGACCGCATTGATCGG |
| SOX6 | 1083 | -GTGATAGTTAGCAA-GTTTTAGAGCTA- |
| | | CCGATCAATGCGGTCTGCGTAAC- |
| | | TTTTTTTTcagccaactccaaTTTTTTTT- |
| | | GTTACGCAGACCGCATTGATCGG |
| SOX6 | 1084 | g-TGAAAAAGAACTCC-GTTTTAGAGCTA- |
| | | CCGATCAATGCGGTCTGCGTAAC- |
| | | TTTTTTTTcagccaactccaaTTTTTTTT- |
| | | GTTACGCAGACCGCATTGATCGG |
| SOX6 | 1085 | g-ATAAGCTCAAAAGC-GTTTTAGAGCTA- |
| | | CCGATCAATGCGGTCTGCGTAAC- |
| | | TTTTTTTTcagccaactccaaTTTTTTTT- |
| | | GTTACGCAGACCGCATTGATCGG |
| SOX6 | 1086 | g-AGTTGGAGTTACTA-GTTTTAGAGCTA- |
| | | CCGATCAATGCGGTCTGCGTAAC- |
| | | TTTTTTTTcagccaactccaaTTTTTTTT- |
| | | GTTACGCAGACCGCATTGATCGG |
| SOX6 | 1087 | g-TTCAAGGACATGAA-GTTTTAGAGCTA- |
| | | CCGATCAATGCGGTCTGCGTAAC- |
| | | TTTTTTTTcagccaactccaaTTTTTTTT- |
| | | GTTACGCAGACCGCATTGATCGG |
| SOX6 | 1088 | g-AACTACACTCAGTT-GTTTTAGAGCTA- |
| | | CCGATCAATGCGGTCTGCGTAAC- |
| | | TTTTTTTTcagccaactccaaTTTTTTTT- |
| | | GTTACGCAGACCGCATTGATCGG |
| SOX6 | 1089 | -GGGTTCCACGCCTT-GTTTTAGAGCTA- |
| | | CCGATCAATGCGGTCTGCGTAAC- |
| | | TTTTTTTTcagccaactccaaTTTTTTTT- |
| | | GTTACGCAGACCGCATTGATCGG |
| SOX6 | 1090 | -GTTTGTTCTACCTA-GTTTTAGAGCTA- |
| | | CCGATCAATGCGGTCTGCGTAAC- |
| | | TTTTTTTTcagccaactccaaTTTTTTTT- |
| | | GTTACGCAGACCGCATTGATCGG |
| SOX6 | 1091 | -GAGCAAAACAATTT-GTTTTAGAGCTA- |
| | | CCGATCAATGCGGTCTGCGTAAC- |
| | | TTTTTTTTcagccaactccaaTTTTTTTT- |
| | | GTTACGCAGACCGCATTGATCGG |
| SOX6 | 1092 | g-TAAATGTGCCTGAC-GTTTTAGAGCTA- |
| | | CCGATCAATGCGGTCTGCGTAAC- |
| | | TTTTTTTTcagccaactccaaTTTTTTTT- |
| | | GTTACGCAGACCGCATTGATCGG |
| SOX6 | 1093 | g-TGATGTTGCACGAC-GTTTTAGAGCTA- |
| | | CCGATCAATGCGGTCTGCGTAAC- |
| | | TTTTTTTTcagccaactccaaTTTTTTTT- |
| | | GTTACGCAGACCGCATTGATCGG |
| SOX6 | 1094 | g-TGAAGCAACTACTA-GTTTTAGAGCTA- |
| | | CCGATCAATGCGGTCTGCGTAAC- |
| | | TTTTTTTTcagccaactccaaTTTTTTTT- |
| | | GTTACGCAGACCGCATTGATCGG |
| SOX6 | 1095 | g-ATCGGCGAGACCAG-GTTTTAGAGCTA- |
| | | CCGATCAATGCGGTCTGCGTAAC- |
| | | TTTTTTTTcagccaactccaaTTTTTTTT- |
| | | GTTACGCAGACCGCATTGATCGG |
| SOX6 | 1096 | g-TGAGACAAGAGGCG-GTTTTAGAGCTA- |
| | | CCGATCAATGCGGTCTGCGTAAC- |
| | | TTTTTTTTcagccaactccaaTTTTTTTT- |
| | | GTTACGCAGACCGCATTGATCGG |
| SOX6 | 1097 | g-CCAAATGCAAGGAT-GTTTTAGAGCTA- |
| | | CCCTTACTCGCGATACTCTCGAC- |
| | | TTTTTTTTcagccaactccaaTTTTTTTT- |
| | | GTCGAGAGTATCGCGAGTAAGGG |
| SOX6 | 1098 | g-CCAATCCTTGCATT-GTTTTAGAGCTA- |
| | | CCCTTACTCGCGATACTCTCGAC- |
| | | TTTTTTTTcagccaactccaaTTTTTTTT- |
| | | GTCGAGAGTATCGCGAGTAAGGG |
| SOX6 | 1099 | -GTGATAGTTAGCAA-GTTTTAGAGCTA- |
| | | CCCTTACTCGCGATACTCTCGAC- |
| | | TTTTTTTTcagccaactccaaTTTTTTTT- |
| | | GTCGAGAGTATCGCGAGTAAGGG |
| SOX6 | 1100 | g-TGAAAAAGAACTCC-GTTTTAGAGCTA- |
| | | CCCTTACTCGCGATACTCTCGAC- |
| | | TTTTTTTTcagccaactccaaTTTTTTTT- |
| | | GTCGAGAGTATCGCGAGTAAGGG |
| SOX6 | 1101 | g-ATAAGCTCAAAAGC-GTTTTAGAGCTA- |
| | | CCCTTACTCGCGATACTCTCGAC- |
| | | TTTTTTTTcagccaactccaaTTTTTTTT- |
| | | GTCGAGAGTATCGCGAGTAAGGG |
| SOX6 | 1102 | g-AGTTGGAGTTACTA-GTTTTAGAGCTA- |
| | | CCCTTACTCGCGATACTCTCGAC- |
| | | TTTTTTTTcagccaactccaaTTTTTTTT- |
| | | GTCGAGAGTATCGCGAGTAAGGG |
| SOX6 | 1103 | g-TTCAAGGACATGAA-GTTTTAGAGCTA- |
| | | CCCTTACTCGCGATACTCTCGAC- |
| | | TTTTTTTTcagccaactccaaTTTTTTTT- |
| | | GTCGAGAGTATCGCGAGTAAGGG |
| SOX6 | 1104 | g-AACTACACTCAGTT-GTTTTAGAGCTA- |
| | | CCCTTACTCGCGATACTCTCGAC- |
| | | TTTTTTTTcagccaactccaaTTTTTTTT- |
| | | GTCGAGAGTATCGCGAGTAAGGG |
| SOX6 | 1105 | -GGGTTCCACGCCTT-GTTTTAGAGCTA- |
| | | CCCTTACTCGCGATACTCTCGAC- |
| | | TTTTTTTTcagccaactccaaTTTTTTTT- |
| | | GTCGAGAGTATCGCGAGTAAGGG |
| SOX6 | 1106 | -GTTTGTTCTACCTA-GTTTTAGAGCTA- |
| | | CCCTTACTCGCGATACTCTCGAC- |
| | | TTTTTTTTcagccaactccaaTTTTTTTT- |
| | | GTCGAGAGTATCGCGAGTAAGGG |
| SOX6 | 1107 | -GAGCAAAACAATTT-GTTTTAGAGCTA- |
| | | CCCTTACTCGCGATACTCTCGAC- |
| | | TTTTTTTTcagccaactccaaTTTTTTTT- |
| | | GTCGAGAGTATCGCGAGTAAGGG |
| SOX6 | 1108 | g-TAAATGTGCCTGAC-GTTTTAGAGCTA- |
| | | CCCTTACTCGCGATACTCTCGAC- |
| | | TTTTTTTTcagccaactccaaTTTTTTTT- |
| | | GTCGAGAGTATCGCGAGTAAGGG |
| SOX6 | 1109 | g-TGATGTTGCACGAC-GTTTTAGAGCTA- |
| | | CCCTTACTCGCGATACTCTCGAC- |
| | | TTTTTTTTcagccaactccaaTTTTTTTT- |
| | | GTCGAGAGTATCGCGAGTAAGGG |
| SOX6 | 1110 | g-TGAAGCAACTACTA-GTTTTAGAGCTA- |
| | | CCCTTACTCGCGATACTCTCGAC- |
| | | TTTTTTTTcagccaactccaaTTTTTTTT- |
| | | GTCGAGAGTATCGCGAGTAAGGG |
| SOX6 | 1111 | g-ATCGGCGAGACCAG-GTTTTAGAGCTA- |
| | | CCCTTACTCGCGATACTCTCGAC- |
| | | TTTTTTTTcagccaactccaaTTTTTTTT- |
| | | GTCGAGAGTATCGCGAGTAAGGG |
| SOX6 | 1112 | g-TGAGACAAGAGGCG-GTTTTAGAGCTA- |
| | | CCCTTACTCGCGATACTCTCGAC- |
| | | TTTTTTTTcagccaactccaaTTTTTTTT- |
| | | GTCGAGAGTATCGCGAGTAAGGG |
| SOX6 | 1113 | g-CCAAATGCAAGGAT-GTTTTAGAGCTA- |
| | | CCGCGGACGGTAAGCACGGAATA- |
| | | TTTTTTTTcagccaactccaaTTTTTTTT- |
| | | TATTCCGTGCTTACCGTCCGCGG |
| SOX6 | 1114 | g-CCAATCCTTGCATT-GTTTTAGAGCTA- |
| | | CCGCGGACGGTAAGCACGGAATA- |
| | | TTTTTTTTcagccaactccaaTTTTTTTT- |
| | | TATTCCGTGCTTACCGTCCGCGG |
| SOX6 | 1115 | -GTGATAGTTAGCAA-GTTTTAGAGCTA- |
| | | CCGCGGACGGTAAGCACGGAATA- |
| | | TTTTTTTTcagccaactccaaTTTTTTTT- |
| | | TATTCCGTGCTTACCGTCCGCGG |
| SOX6 | 1116 | g-TGAAAAAGAACTCC-GTTTTAGAGCTA- |
| | | CCGCGGACGGTAAGCACGGAATA- |
| | | TTTTTTTTcagccaactccaaTTTTTTTT- |
| | | TATTCCGTGCTTACCGTCCGCGG |
| SOX6 | 1117 | g-ATAAGCTCAAAAGC-GTTTTAGAGCTA- |
| | | CCGCGGACGGTAAGCACGGAATA- |
| | | TTTTTTTTcagccaactccaaTTTTTTTT- |
| | | TATTCCGTGCTTACCGTCCGCGG |
| SOX6 | 1118 | g-AGTTGGAGTTACTA-GTTTTAGAGCTA- |
| | | CCGCGGACGGTAAGCACGGAATA- |
| | | TTTTTTTTcagccaactccaaTTTTTTTT- |
| | | TATTCCGTGCTTACCGTCCGCGG |
| SOX6 | 1119 | g-TTCAAGGACATGAA-GTTTTAGAGCTA- |
| | | CCGCGGACGGTAAGCACGGAATA- |
| | | TTTTTTTTcagccaactccaaTTTTTTTT- |
| | | TATTCCGTGCTTACCGTCCGCGG |
| SOX6 | 1120 | g-AACTACACTCAGTT-GTTTTAGAGCTA- |
| | | CCGCGGACGGTAAGCACGGAATA- |
| | | TTTTTTTTcagccaactccaaTTTTTTTT- |
| | | TATTCCGTGCTTACCGTCCGCGG |
| SOX6 | 1121 | -GGGTTCCACGCCTT-GTTTTAGAGCTA- |
| | | CCGCGGACGGTAAGCACGGAATA- |
| | | TTTTTTTTcagccaactccaaTTTTTTTT- |
| | | TATTCCGTGCTTACCGTCCGCGG |
| SOX6 | 1122 | -GTTTGTTCTACCTA-GTTTTAGAGCTA- |
| | | CCGCGGACGGTAAGCACGGAATA- |
| | | TTTTTTTTcagccaactccaaTTTTTTTT- |
| | | TATTCCGTGCTTACCGTCCGCGG |
| SOX6 | 1123 | -GAGCAAAACAATTT-GTTTTAGAGCTA- |
| | | CCGCGGACGGTAAGCACGGAATA- |
| | | TTTTTTTTcagccaactccaaTTTTTTTT- |
| | | TATTCCGTGCTTACCGTCCGCGG |
| SOX6 | 1124 | g-TAAATGTGCCTGAC-GTTTTAGAGCTA- |
| | | CCGCGGACGGTAAGCACGGAATA- |
| | | TTTTTTTTcagccaactccaaTTTTTTTT- |
| | | TATTCCGTGCTTACCGTCCGCGG |
| SOX6 | 1125 | g-TGATGTTGCACGAC-GTTTTAGAGCTA- |
| | | CCGCGGACGGTAAGCACGGAATA- |
| | | TTTTTTTTcagccaactccaaTTTTTTTT- |
| | | TATTCCGTGCTTACCGTCCGCGG |
| SOX6 | 1126 | g-TGAAGCAACTACTA-GTTTTAGAGCTA- |
| | | CCGCGGACGGTAAGCACGGAATA- |
| | | TTTTTTTTcagccaactccaaTTTTTTTT- |
| | | TATTCCGTGCTTACCGTCCGCGG |
| SOX6 | 1127 | g-ATCGGCGAGACCAG-GTTTTAGAGCTA- |
| | | CCGCGGACGGTAAGCACGGAATA- |
| | | TTTTTTTTcagccaactccaaTTTTTTTT- |
| | | TATTCCGTGCTTACCGTCCGCGG |
| SOX6 | 1128 | g-TGAGACAAGAGGCG-GTTTTAGAGCTA- |
| | | CCGCGGACGGTAAGCACGGAATA- |
| | | TTTTTTTTcagccaactccaaTTTTTTTT- |
| | | TATTCCGTGCTTACCGTCCGCGG |
| SOX6 | 1129 | g-CCAAATGCAAGGAT-GTTTTAGAGCTA- |
| | | CCTATAGTCACGAATCGTAGGGT- |
| | | TTTTTTTTcagccaactccaaTTTTTTTT- |
| | | ACCCTACGATTCGTGACTATAGG |
| SOX6 | 1130 | g-CCAATCCTTGCATT-GTTTTAGAGCTA- |
| | | CCTATAGTCACGAATCGTAGGGT- |
| | | TTTTTTTTcagccaactccaaTTTTTTTT- |
| | | ACCCTACGATTCGTGACTATAGG |
| SOX6 | 1131 | -GTGATAGTTAGCAA-GTTTTAGAGCTA- |
| | | CCTATAGTCACGAATCGTAGGGT- |
| | | TTTTTTTTcagccaactccaaTTTTTTTT- |
| | | ACCCTACGATTCGTGACTATAGG |
| SOX6 | 1132 | g-TGAAAAAGAACTCC-GTTTTAGAGCTA- |
| | | CCTATAGTCACGAATCGTAGGGT- |
| | | TTTTTTTTcagccaactccaaTTTTTTTT- |
| | | ACCCTACGATTCGTGACTATAGG |
| SOX6 | 1133 | g-ATAAGCTCAAAAGC-GTTTTAGAGCTA- |
| | | CCTATAGTCACGAATCGTAGGGT- |
| | | TTTTTTTTcagccaactccaaTTTTTTTT- |
| | | ACCCTACGATTCGTGACTATAGG |
| SOX6 | 1134 | g-AGTTGGAGTTACTA-GTTTTAGAGCTA- |
| | | CCTATAGTCACGAATCGTAGGGT- |
| | | TTTTTTTTcagccaactccaaTTTTTTTT- |
| | | ACCCTACGATTCGTGACTATAGG |
| SOX6 | 1135 | g-TTCAAGGACATGAA-GTTTTAGAGCTA- |
| | | CCTATAGTCACGAATCGTAGGGT- |
| | | TTTTTTTTcagccaactccaaTTTTTTTT- |
| | | ACCCTACGATTCGTGACTATAGG |
| SOX6 | 1136 | g-AACTACACTCAGTT-GTTTTAGAGCTA- |
| | | CCTATAGTCACGAATCGTAGGGT- |
| | | TTTTTTTTcagccaactccaaTTTTTTTT- |
| | | ACCCTACGATTCGTGACTATAGG |
| SOX6 | 1137 | -GGGTTCCACGCCTT-GTTTTAGAGCTA- |
| | | CCTATAGTCACGAATCGTAGGGT- |
| | | TTTTTTTTcagccaactccaaTTTTTTTT- |
| | | ACCCTACGATTCGTGACTATAGG |
| SOX6 | 1138 | -GTTTGTTCTACCTA-GTTTTAGAGCTA- |
| | | CCTATAGTCACGAATCGTAGGGT- |
| | | TTTTTTTTcagccaactccaaTTTTTTTT- |
| | | ACCCTACGATTCGTGACTATAGG |
| SOX6 | 1139 | -GAGCAAAACAATTT-GTTTTAGAGCTA- |
| | | CCTATAGTCACGAATCGTAGGGT- |
| | | TTTTTTTTcagccaactccaaTTTTTTTT- |
| | | ACCCTACGATTCGTGACTATAGG |
| SOX6 | 1140 | g-TAAATGTGCCTGAC-GTTTTAGAGCTA- |
| | | CCTATAGTCACGAATCGTAGGGT- |
| | | TTTTTTTTcagccaactccaaTTTTTTTT- |
| | | ACCCTACGATTCGTGACTATAGG |
| SOX6 | 1141 | g-TGATGTTGCACGAC-GTTTTAGAGCTA- |
| | | CCTATAGTCACGAATCGTAGGGT- |
| | | TTTTTTTTcagccaactccaaTTTTTTTT- |
| | | ACCCTACGATTCGTGACTATAGG |
| SOX6 | 1142 | g-TGAAGCAACTACTA-GTTTTAGAGCTA- |
| | | CCTATAGTCACGAATCGTAGGGT- |
| | | TTTTTTTTcagccaactccaaTTTTTTTT- |
| | | ACCCTACGATTCGTGACTATAGG |
| SOX6 | 1143 | g-ATCGGCGAGACCAG-GTTTTAGAGCTA- |
| | | CCTATAGTCACGAATCGTAGGGT- |
| | | TTTTTTTTcagccaactccaaTTTTTTTT- |
| | | ACCCTACGATTCGTGACTATAGG |
| SOX6 | 1144 | g-TGAGACAAGAGGCG-GTTTTAGAGCTA- |
| | | CCTATAGTCACGAATCGTAGGGT- |
| | | TTTTTTTTcagccaactccaaTTTTTTTT- |
| | | ACCCTACGATTCGTGACTATAGG |
| SOX6 | 1145 | g-CCAAATGCAAGGAT-GTTTTAGAGCTA- |
| | | CCCGTCGTCACGTATGCGTAGCA- |
| | | TTTTTTTTcagccaactccaaTTTTTTTT- |
| | | TGCTACGCATACGTGACGACGGG |
| SOX6 | 1146 | g-CCAATCCTTGCATT-GTTTTAGAGCTA- |
| | | CCCGTCGTCACGTATGCGTAGCA- |
| | | TTTTTTTTcagccaactccaaTTTTTTTT- |
| | | TGCTACGCATACGTGACGACGGG |
| SOX6 | 1147 | -GTGATAGTTAGCAA-GTTTTAGAGCTA- |
| | | CCCGTCGTCACGTATGCGTAGCA- |
| | | TTTTTTTTcagccaactccaaTTTTTTTT- |
| | | TGCTACGCATACGTGACGACGGG |
| SOX6 | 1148 | g-TGAAAAAGAACTCC-GTTTTAGAGCTA- |
| | | CCCGTCGTCACGTATGCGTAGCA- |
| | | TTTTTTTTcagccaactccaaTTTTTTTT- |
| | | TGCTACGCATACGTGACGACGGG |
| SOX6 | 1149 | g-ATAAGCTCAAAAGC-GTTTTAGAGCTA- |
| | | CCCGTCGTCACGTATGCGTAGCA- |
| | | TTTTTTTTcagccaactccaaTTTTTTTT- |
| | | TGCTACGCATACGTGACGACGGG |
| SOX6 | 1150 | g-AGTTGGAGTTACTA-GTTTTAGAGCTA- |
| | | CCCGTCGTCACGTATGCGTAGCA- |
| | | TTTTTTTTcagccaactccaaTTTTTTTT- |
| | | TGCTACGCATACGTGACGACGGG |
| SOX6 | 1151 | g-TTCAAGGACATGAA-GTTTTAGAGCTA- |
| | | CCCGTCGTCACGTATGCGTAGCA- |
| | | TTTTTTTTcagccaactccaaTTTTTTTT- |
| | | TGCTACGCATACGTGACGACGGG |
| SOX6 | 1152 | g-AACTACACTCAGTT-GTTTTAGAGCTA- |
| | | CCCGTCGTCACGTATGCGTAGCA- |
| | | TTTTTTTTcagccaactccaaTTTTTTTT- |
| | | TGCTACGCATACGTGACGACGGG |
| SOX6 | 1153 | -GGGTTCCACGCCTT-GTTTTAGAGCTA- |
| | | CCCGTCGTCACGTATGCGTAGCA- |
| | | TTTTTTTTcagccaactccaaTTTTTTTT- |
| | | TGCTACGCATACGTGACGACGGG |
| SOX6 | 1154 | -GTTTGTTCTACCTA-GTTTTAGAGCTA- |
| | | CCCGTCGTCACGTATGCGTAGCA- |
| | | TTTTTTTTcagccaactccaaTTTTTTTT- |
| | | TGCTACGCATACGTGACGACGGG |
| SOX6 | 1155 | -GAGCAAAACAATTT-GTTTTAGAGCTA- |
| | | CCCGTCGTCACGTATGCGTAGCA- |
| | | TTTTTTTTcagccaactccaaTTTTTTTT- |
| | | TGCTACGCATACGTGACGACGGG |
| SOX6 | 1156 | g-TAAATGTGCCTGAC-GTTTTAGAGCTA- |
| | | CCCGTCGTCACGTATGCGTAGCA- |
| | | TTTTTTTTcagccaactccaaTTTTTTTT- |
| | | TGCTACGCATACGTGACGACGGG |
| SOX6 | 1157 | g-TGATGTTGCACGAC-GTTTTAGAGCTA- |
| | | CCCGTCGTCACGTATGCGTAGCA- |
| | | TTTTTTTTcagccaactccaaTTTTTTTT- |
| | | TGCTACGCATACGTGACGACGGG |
| SOX6 | 1158 | g-TGAAGCAACTACTA-GTTTTAGAGCTA- |
| | | CCCGTCGTCACGTATGCGTAGCA- |
| | | TTTTTTTTcagccaactccaaTTTTTTTT- |
| | | TGCTACGCATACGTGACGACGGG |
| SOX6 | 1159 | g-ATCGGCGAGACCAG-GTTTTAGAGCTA- |
| | | CCCGTCGTCACGTATGCGTAGCA- |
| | | TTTTTTTTcagccaactccaaTTTTTTTT- |
| | | TGCTACGCATACGTGACGACGGG |
| SOX6 | 1160 | g-TGAGACAAGAGGCG-GTTTTAGAGCTA- |
| | | CCCGTCGTCACGTATGCGTAGCA- |
| | | TTTTTTTTcagccaactccaaTTTTTTTT- |
| | | TGCTACGCATACGTGACGACGGG |
| SOX6 | 1161 | g-CCAAATGCAAGGAT-GTTTTAGAGCTA- |
| | | CCCGAGAGGTAGTAGACGACGCA- |
| | | TTTTTTTTcagccaactccaaTTTTTTTT- |
| | | TGCGTCGTCTACTACCTCTCGGG |
| SOX6 | 1162 | g-CCAATCCTTGCATT-GTTTTAGAGCTA- |
| | | CCCGAGAGGTAGTAGACGACGCA- |
| | | TTTTTTTTcagccaactccaaTTTTTTTT- |
| | | TGCGTCGTCTACTACCTCTCGGG |
| SOX6 | 1163 | -GTGATAGTTAGCAA-GTTTTAGAGCTA- |
| | | CCCGAGAGGTAGTAGACGACGCA- |
| | | TTTTTTTTcagccaactccaaTTTTTTTT- |
| | | TGCGTCGTCTACTACCTCTCGGG |
| SOX6 | 1164 | g-TGAAAAAGAACTCC-GTTTTAGAGCTA- |
| | | CCCGAGAGGTAGTAGACGACGCA- |
| | | TTTTTTTTcagccaactccaaTTTTTTTT- |
| | | TGCGTCGTCTACTACCTCTCGGG |
| SOX6 | 1165 | g-ATAAGCTCAAAAGC-GTTTTAGAGCTA- |
| | | CCCGAGAGGTAGTAGACGACGCA- |
| | | TTTTTTTTcagccaactccaaTTTTTTTT- |
| | | TGCGTCGTCTACTACCTCTCGGG |
| SOX6 | 1166 | g-AGTTGGAGTTACTA-GTTTTAGAGCTA- |
| | | CCCGAGAGGTAGTAGACGACGCA- |
| | | TTTTTTTTcagccaactccaaTTTTTTTT- |
| | | TGCGTCGTCTACTACCTCTCGGG |
| SOX6 | 1167 | g-TTCAAGGACATGAA-GTTTTAGAGCTA- |
| | | CCCGAGAGGTAGTAGACGACGCA- |
| | | TTTTTTTTcagccaactccaaTTTTTTTT- |
| | | TGCGTCGTCTACTACCTCTCGGG |
| SOX6 | 1168 | g-AACTACACTCAGTT-GTTTTAGAGCTA- |
| | | CCCGAGAGGTAGTAGACGACGCA- |
| | | TTTTTTTTcagccaactccaaTTTTTTTT- |
| | | TGCGTCGTCTACTACCTCTCGGG |
| SOX6 | 1169 | -GGGTTCCACGCCTT-GTTTTAGAGCTA- |
| | | CCCGAGAGGTAGTAGACGACGCA- |
| | | TTTTTTTTcagccaactccaaTTTTTTTT- |
| | | TGCGTCGTCTACTACCTCTCGGG |
| SOX6 | 1170 | -GTTTGTTCTACCTA-GTTTTAGAGCTA- |
| | | CCCGAGAGGTAGTAGACGACGCA- |
| | | TTTTTTTTcagccaactccaaTTTTTTTT- |
| | | TGCGTCGTCTACTACCTCTCGGG |
| SOX6 | 1171 | -GAGCAAAACAATTT-GTTTTAGAGCTA- |
| | | CCCGAGAGGTAGTAGACGACGCA- |
| | | TTTTTTTTcagccaactccaaTTTTTTTT- |
| | | TGCGTCGTCTACTACCTCTCGGG |
| SOX6 | 1172 | g-TAAATGTGCCTGAC-GTTTTAGAGCTA- |
| | | CCCGAGAGGTAGTAGACGACGCA- |
| | | TTTTTTTTcagccaactccaaTTTTTTTT- |
| | | TGCGTCGTCTACTACCTCTCGGG |
| SOX6 | 1173 | g-TGATGTTGCACGAC-GTTTTAGAGCTA- |
| | | CCCGAGAGGTAGTAGACGACGCA- |
| | | TTTTTTTTcagccaactccaaTTTTTTTT- |
| | | TGCGTCGTCTACTACCTCTCGGG |
| SOX6 | 1174 | g-TGAAGCAACTACTA-GTTTTAGAGCTA- |
| | | CCCGAGAGGTAGTAGACGACGCA- |
| | | TTTTTTTTcagccaactccaaTTTTTTTT- |
| | | TGCGTCGTCTACTACCTCTCGGG |
| SOX6 | 1175 | g-ATCGGCGAGACCAG-GTTTTAGAGCTA- |
| | | CCCGAGAGGTAGTAGACGACGCA- |
| | | TTTTTTTTcagccaactccaaTTTTTTTT- |
| | | TGCGTCGTCTACTACCTCTCGGG |
| SOX6 | 1176 | g-TGAGACAAGAGGCG-GTTTTAGAGCTA- |
| | | CCCGAGAGGTAGTAGACGACGCA- |
| | | TTTTTTTTcagccaactccaaTTTTTTTT- |
| | | TGCGTCGTCTACTACCTCTCGGG |
| SOX6 | 1177 | g-CCAAATGCAAGGAT-GTTTTAGAGCTA- |
| | | CCGACGTCTACGGACGGGAGCTA- |
| | | TTTTTTTTcagccaactccaaTTTTTTTT- |
| | | TAGCTCCCGTCCGTAGACGTCGG |
| SOX6 | 1178 | g-CCAATCCTTGCATT-GTTTTAGAGCTA- |
| | | CCGACGTCTACGGACGGGAGCTA- |
| | | TTTTTTTTcagccaactccaaTTTTTTTT- |
| | | TAGCTCCCGTCCGTAGACGTCGG |
| SOX6 | 1179 | -GTGATAGTTAGCAA-GTTTTAGAGCTA- |
| | | CCGACGTCTACGGACGGGAGCTA- |
| | | TTTTTTTTcagccaactccaaTTTTTTTT- |
| | | TAGCTCCCGTCCGTAGACGTCGG |
| SOX6 | 1180 | g-TGAAAAAGAACTCC-GTTTTAGAGCTA- |
| | | CCGACGTCTACGGACGGGAGCTA- |
| | | TTTTTTTTcagccaactccaaTTTTTTTT- |
| | | TAGCTCCCGTCCGTAGACGTCGG |
| SOX6 | 1181 | g-ATAAGCTCAAAAGC-GTTTTAGAGCTA- |
| | | CCGACGTCTACGGACGGGAGCTA- |
| | | TTTTTTTTcagccaactccaaTTTTTTTT- |
| | | TAGCTCCCGTCCGTAGACGTCGG |
| SOX6 | 1182 | g-AGTTGGAGTTACTA-GTTTTAGAGCTA- |
| | | CCGACGTCTACGGACGGGAGCTA- |
| | | TTTTTTTTcagccaactccaaTTTTTTTT- |
| | | TAGCTCCCGTCCGTAGACGTCGG |
| SOX6 | 1183 | g-TTCAAGGACATGAA-GTTTTAGAGCTA- |
| | | CCGACGTCTACGGACGGGAGCTA- |
| | | TTTTTTTTcagccaactccaaTTTTTTTT- |
| | | TAGCTCCCGTCCGTAGACGTCGG |
| SOX6 | 1184 | g-AACTACACTCAGTT-GTTTTAGAGCTA- |
| | | CCGACGTCTACGGACGGGAGCTA- |
| | | TTTTTTTTcagccaactccaaTTTTTTTT- |
| | | TAGCTCCCGTCCGTAGACGTCGG |
| SOX6 | 1185 | -GGGTTCCACGCCTT-GTTTTAGAGCTA- |
| | | CCGACGTCTACGGACGGGAGCTA- |
| | | TTTTTTTTcagccaactccaaTTTTTTTT- |
| | | TAGCTCCCGTCCGTAGACGTCGG |
| SOX6 | 1186 | -GTTTGTTCTACCTA-GTTTTAGAGCTA- |
| | | CCGACGTCTACGGACGGGAGCTA- |
| | | TTTTTTTTcagccaactccaaTTTTTTTT- |
| | | TAGCTCCCGTCCGTAGACGTCGG |
| SOX6 | 1187 | -GAGCAAAACAATTT-GTTTTAGAGCTA- |
| | | CCGACGTCTACGGACGGGAGCTA- |
| | | TTTTTTTTcagccaactccaaTTTTTTTT- |
| | | TAGCTCCCGTCCGTAGACGTCGG |
| SOX6 | 1188 | g-TAAATGTGCCTGAC-GTTTTAGAGCTA- |
| | | CCGACGTCTACGGACGGGAGCTA- |
| | | TTTTTTTTcagccaactccaaTTTTTTTT- |
| | | TAGCTCCCGTCCGTAGACGTCGG |
| SOX6 | 1189 | g-TGATGTTGCACGAC-GTTTTAGAGCTA- |
| | | CCGACGTCTACGGACGGGAGCTA- |
| | | TTTTTTTTcagccaactccaaTTTTTTTT- |
| | | TAGCTCCCGTCCGTAGACGTCGG |
| SOX6 | 1190 | g-TGAAGCAACTACTA-GTTTTAGAGCTA- |
| | | CCGACGTCTACGGACGGGAGCTA- |
| | | TTTTTTTTcagccaactccaaTTTTTTTT- |
| | | TAGCTCCCGTCCGTAGACGTCGG |
| SOX6 | 1191 | g-ATCGGCGAGACCAG-GTTTTAGAGCTA- |
| | | CCGACGTCTACGGACGGGAGCTA- |
| | | TTTTTTTTcagccaactccaaTTTTTTTT- |
| | | TAGCTCCCGTCCGTAGACGTCGG |
| SOX6 | 1192 | g-TGAGACAAGAGGCG-GTTTTAGAGCTA- |
| | | CCGACGTCTACGGACGGGAGCTA- |
| | | TTTTTTTTcagccaactccaaTTTTTTTT- |
| | | TAGCTCCCGTCCGTAGACGTCGG |
| SOX6 | 1193 | g-CCAAATGCAAGGAT-GTTTTAGAGCTA- |
| | | CCAAAGCTCATTCGCGACTGAGC- |
| | | TTTTTTTTcagccaactccaaTTTTTTTT- |
| | | GCTCAGTCGCGAATGAGCTTTGG |
| SOX6 | 1194 | g-CCAATCCTTGCATT-GTTTTAGAGCTA- |
| | | CCAAAGCTCATTCGCGACTGAGC- |
| | | TTTTTTTTcagccaactccaaTTTTTTTT- |
| | | GCTCAGTCGCGAATGAGCTTTGG |
| SOX6 | 1195 | -GTGATAGTTAGCAA-GTTTTAGAGCTA- |
| | | CCAAAGCTCATTCGCGACTGAGC- |
| | | TTTTTTTTcagccaactccaaTTTTTTTT- |
| | | GCTCAGTCGCGAATGAGCTTTGG |
| SOX6 | 1196 | g-TGAAAAAGAACTCC-GTTTTAGAGCTA- |
| | | CCAAAGCTCATTCGCGACTGAGC- |
| | | TTTTTTTTcagccaactccaaTTTTTTTT- |
| | | GCTCAGTCGCGAATGAGCTTTGG |
| SOX6 | 1197 | g-ATAAGCTCAAAAGC-GTTTTAGAGCTA- |
| | | CCAAAGCTCATTCGCGACTGAGC- |
| | | TTTTTTTTcagccaactccaaTTTTTTTT- |
| | | GCTCAGTCGCGAATGAGCTTTGG |
| SOX6 | 1198 | g-AGTTGGAGTTACTA-GTTTTAGAGCTA- |
| | | CCAAAGCTCATTCGCGACTGAGC- |
| | | TTTTTTTTcagccaactccaaTTTTTTTT- |
| | | GCTCAGTCGCGAATGAGCTTTGG |
| SOX6 | 1199 | g-TTCAAGGACATGAA-GTTTTAGAGCTA- |
| | | CCAAAGCTCATTCGCGACTGAGC- |
| | | TTTTTTTTcagccaactccaaTTTTTTTT- |
| | | GCTCAGTCGCGAATGAGCTTTGG |
| SOX6 | 1200 | g-AACTACACTCAGTT-GTTTTAGAGCTA- |
| | | CCAAAGCTCATTCGCGACTGAGC- |
| | | TTTTTTTTcagccaactccaaTTTTTTTT- |
| | | GCTCAGTCGCGAATGAGCTTTGG |
| SOX6 | 1201 | -GGGTTCCACGCCTT-GTTTTAGAGCTA- |
| | | CCAAAGCTCATTCGCGACTGAGC- |
| | | TTTTTTTTcagccaactccaaTTTTTTTT- |
| | | GCTCAGTCGCGAATGAGCTTTGG |
| SOX6 | 1202 | -GTTTGTTCTACCTA-GTTTTAGAGCTA- |
| | | CCAAAGCTCATTCGCGACTGAGC- |
| | | TTTTTTTTcagccaactccaaTTTTTTTT- |
| | | GCTCAGTCGCGAATGAGCTTTGG |
| SOX6 | 1203 | -GAGCAAAACAATTT-GTTTTAGAGCTA- |
| | | CCAAAGCTCATTCGCGACTGAGC- |
| | | TTTTTTTTcagccaactccaaTTTTTTTT- |
| | | GCTCAGTCGCGAATGAGCTTTGG |
| SOX6 | 1204 | g-TAAATGTGCCTGAC-GTTTTAGAGCTA- |
| | | CCAAAGCTCATTCGCGACTGAGC- |
| | | TTTTTTTTcagccaactccaaTTTTTTTT- |
| | | GCTCAGTCGCGAATGAGCTTTGG |
| SOX6 | 1205 | g-TGATGTTGCACGAC-GTTTTAGAGCTA- |
| | | CCAAAGCTCATTCGCGACTGAGC- |
| | | TTTTTTTTcagccaactccaaTTTTTTTT- |
| | | GCTCAGTCGCGAATGAGCTTTGG |
| SOX6 | 1206 | g-TGAAGCAACTACTA-GTTTTAGAGCTA- |
| | | CCAAAGCTCATTCGCGACTGAGC- |
| | | TTTTTTTTcagccaactccaaTTTTTTTT- |
| | | GCTCAGTCGCGAATGAGCTTTGG |
| SOX6 | 1207 | g-ATCGGCGAGACCAG-GTTTTAGAGCTA- |
| | | CCAAAGCTCATTCGCGACTGAGC- |
| | | TTTTTTTTcagccaactccaaTTTTTTTT- |
| | | GCTCAGTCGCGAATGAGCTTTGG |
| SOX6 | 1208 | g-TGAGACAAGAGGCG-GTTTTAGAGCTA- |
| | | CCAAAGCTCATTCGCGACTGAGC- |
| | | TTTTTTTTcagccaactccaaTTTTTTTT- |
| | | GCTCAGTCGCGAATGAGCTTTGG |
| SOX6 | 1209 | g-CCAAATGCAAGGAT-GTTTTAGAGCTA- |
| | | CCATGGCACGATCGACACGGAGG- |
| | | TTTTTTTTcagccaactccaaTTTTTTTT- |
| | | CCTCCGTGTCGATCGTGCCATGG |
| SOX6 | 1210 | g-CCAATCCTTGCATT-GTTTTAGAGCTA- |
| | | CCATGGCACGATCGACACGGAGG- |
| | | TTTTTTTTcagccaactccaaTTTTTTTT- |
| | | CCTCCGTGTCGATCGTGCCATGG |
| SOX6 | 1211 | -GTGATAGTTAGCAA-GTTTTAGAGCTA- |
| | | CCATGGCACGATCGACACGGAGG- |
| | | TTTTTTTTcagccaactccaaTTTTTTTT- |
| | | CCTCCGTGTCGATCGTGCCATGG |
| SOX6 | 1212 | g-TGAAAAAGAACTCC-GTTTTAGAGCTA- |
| | | CCATGGCACGATCGACACGGAGG- |
| | | TTTTTTTTcagccaactccaaTTTTTTTT- |
| | | CCTCCGTGTCGATCGTGCCATGG |
| SOX6 | 1213 | g-ATAAGCTCAAAAGC-GTTTTAGAGCTA- |
| | | CCATGGCACGATCGACACGGAGG- |
| | | TTTTTTTTcagccaactccaaTTTTTTTT- |
| | | CCTCCGTGTCGATCGTGCCATGG |
| SOX6 | 1214 | g-AGTTGGAGTTACTA-GTTTTAGAGCTA- |
| | | CCATGGCACGATCGACACGGAGG- |
| | | TTTTTTTTcagccaactccaaTTTTTTTT- |
| | | CCTCCGTGTCGATCGTGCCATGG |
| SOX6 | 1215 | g-TTCAAGGACATGAA-GTTTTAGAGCTA- |
| | | CCATGGCACGATCGACACGGAGG- |
| | | TTTTTTTTcagccaactccaaTTTTTTTT- |
| | | CCTCCGTGTCGATCGTGCCATGG |
| SOX6 | 1216 | g-AACTACACTCAGTT-GTTTTAGAGCTA- |
| | | CCATGGCACGATCGACACGGAGG- |
| | | TTTTTTTTcagccaactccaaTTTTTTTT- |
| | | CCTCCGTGTCGATCGTGCCATGG |
| SOX6 | 1217 | -GGGTTCCACGCCTT-GTTTTAGAGCTA- |
| | | CCATGGCACGATCGACACGGAGG- |
| | | TTTTTTTTcagccaactccaaTTTTTTTT- |
| | | CCTCCGTGTCGATCGTGCCATGG |
| SOX6 | 1218 | -GTTTGTTCTACCTA-GTTTTAGAGCTA- |
| | | CCATGGCACGATCGACACGGAGG- |
| | | TTTTTTTTcagccaactccaaTTTTTTTT- |
| | | CCTCCGTGTCGATCGTGCCATGG |
| SOX6 | 1219 | -GAGCAAAACAATTT-GTTTTAGAGCTA- |
| | | CCATGGCACGATCGACACGGAGG- |
| | | TTTTTTTTcagccaactccaaTTTTTTTT- |
| | | CCTCCGTGTCGATCGTGCCATGG |
| SOX6 | 1220 | g-TAAATGTGCCTGAC-GTTTTAGAGCTA- |
| | | CCATGGCACGATCGACACGGAGG- |
| | | TTTTTTTTcagccaactccaaTTTTTTTT- |
| | | CCTCCGTGTCGATCGTGCCATGG |
| SOX6 | 1221 | g-TGATGTTGCACGAC-GTTTTAGAGCTA- |
| | | CCATGGCACGATCGACACGGAGG- |
| | | TTTTTTTTcagccaactccaaTTTTTTTT- |
| | | CCTCCGTGTCGATCGTGCCATGG |
| SOX6 | 1222 | g-TGAAGCAACTACTA-GTTTTAGAGCTA- |
| | | CCATGGCACGATCGACACGGAGG- |
| | | TTTTTTTTcagccaactccaaTTTTTTTT- |
| | | CCTCCGTGTCGATCGTGCCATGG |
| SOX6 | 1223 | g-ATCGGCGAGACCAG-GTTTTAGAGCTA- |
| | | CCATGGCACGATCGACACGGAGG- |
| | | TTTTTTTTcagccaactccaaTTTTTTTT- |
| | | CCTCCGTGTCGATCGTGCCATGG |
| SOX6 | 1224 | g-TGAGACAAGAGGCG-GTTTTAGAGCTA- |
| | | CCATGGCACGATCGACACGGAGG- |
| | | TTTTTTTTcagccaactccaaTTTTTTTT- |
| | | CCTCCGTGTCGATCGTGCCATGG |
| SOX6 | 1225 | g-CCAAATGCAAGGAT-GTTTTAGAGCTA- |
| | | CCCGAACTCTCTATCGAACGAGT- |
| | | TTTTTTTTcagccaactccaaTTTTTTTT- |
| | | ACTCGTTCGATAGAGAGTTCGGG |
| SOX6 | 1226 | g-CCAATCCTTGCATT-GTTTTAGAGCTA- |
| | | CCCGAACTCTCTATCGAACGAGT- |
| | | TTTTTTTTcagccaactccaaTTTTTTTT- |
| | | ACTCGTTCGATAGAGAGTTCGGG |
| SOX6 | 1227 | -GTGATAGTTAGCAA-GTTTTAGAGCTA- |
| | | CCCGAACTCTCTATCGAACGAGT- |
| | | TTTTTTTTcagccaactccaaTTTTTTTT- |
| | | ACTCGTTCGATAGAGAGTTCGGG |
| SOX6 | 1228 | g-TGAAAAAGAACTCC-GTTTTAGAGCTA- |
| | | CCCGAACTCTCTATCGAACGAGT- |
| | | TTTTTTTTcagccaactccaaTTTTTTTT- |
| | | ACTCGTTCGATAGAGAGTTCGGG |
| SOX6 | 1229 | g-ATAAGCTCAAAAGC-GTTTTAGAGCTA- |
| | | CCCGAACTCTCTATCGAACGAGT- |
| | | TTTTTTTTcagccaactccaaTTTTTTTT- |
| | | ACTCGTTCGATAGAGAGTTCGGG |
| SOX6 | 1230 | g-AGTTGGAGTTACTA-GTTTTAGAGCTA- |
| | | CCCGAACTCTCTATCGAACGAGT- |
| | | TTTTTTTTcagccaactccaaTTTTTTTT- |
| | | ACTCGTTCGATAGAGAGTTCGGG |
| SOX6 | 1231 | g-TTCAAGGACATGAA-GTTTTAGAGCTA- |
| | | CCCGAACTCTCTATCGAACGAGT- |
| | | TTTTTTTTcagccaactccaaTTTTTTTT- |
| | | ACTCGTTCGATAGAGAGTTCGGG |
| SOX6 | 1232 | g-AACTACACTCAGTT-GTTTTAGAGCTA- |
| | | CCCGAACTCTCTATCGAACGAGT- |
| | | TTTTTTTTcagccaactccaaTTTTTTTT- |
| | | ACTCGTTCGATAGAGAGTTCGGG |
| SOX6 | 1233 | -GGGTTCCACGCCTT-GTTTTAGAGCTA- |
| | | CCCGAACTCTCTATCGAACGAGT- |
| | | TTTTTTTTcagccaactccaaTTTTTTTT- |
| | | ACTCGTTCGATAGAGAGTTCGGG |
| SOX6 | 1234 | -GTTTGTTCTACCTA-GTTTTAGAGCTA- |
| | | CCCGAACTCTCTATCGAACGAGT- |
| | | TTTTTTTTcagccaactccaaTTTTTTTT- |
| | | ACTCGTTCGATAGAGAGTTCGGG |
| SOX6 | 1235 | -GAGCAAAACAATTT-GTTTTAGAGCTA- |
| | | CCCGAACTCTCTATCGAACGAGT- |
| | | TTTTTTTTcagccaactccaaTTTTTTTT- |
| | | ACTCGTTCGATAGAGAGTTCGGG |
| SOX6 | 1236 | g-TAAATGTGCCTGAC-GTTTTAGAGCTA- |
| | | CCCGAACTCTCTATCGAACGAGT- |
| | | TTTTTTTTcagccaactccaaTTTTTTTT- |
| | | ACTCGTTCGATAGAGAGTTCGGG |
| SOX6 | 1237 | g-TGATGTTGCACGAC-GTTTTAGAGCTA- |
| | | CCCGAACTCTCTATCGAACGAGT- |
| | | TTTTTTTTcagccaactccaaTTTTTTTT- |
| | | ACTCGTTCGATAGAGAGTTCGGG |
| SOX6 | 1238 | g-TGAAGCAACTACTA-GTTTTAGAGCTA- |
| | | CCCGAACTCTCTATCGAACGAGT- |
| | | TTTTTTTTcagccaactccaaTTTTTTTT- |
| | | ACTCGTTCGATAGAGAGTTCGGG |
| SOX6 | 1239 | g-ATCGGCGAGACCAG-GTTTTAGAGCTA- |
| | | CCCGAACTCTCTATCGAACGAGT- |
| | | TTTTTTTTcagccaactccaaTTTTTTTT- |
| | | ACTCGTTCGATAGAGAGTTCGGG |
| SOX6 | 1240 | g-TGAGACAAGAGGCG-GTTTTAGAGCTA- |
| | | CCCGAACTCTCTATCGAACGAGT- |
| | | TTTTTTTTcagccaactccaaTTTTTTTT- |
| | | ACTCGTTCGATAGAGAGTTCGGG |
| SOX6 | 1241 | g-CCAAATGCAAGGAT-GTTTTAGAGCTA- |
| | | CCTACACGATAGTGGTCGTGCGC- |
| | | TTTTTTTTcagccaactccaaTTTTTTTT- |
| | | GCGCACGACCACTATCGTGTAGG |
| SOX6 | 1242 | g-CCAATCCTTGCATT-GTTTTAGAGCTA- |
| | | CCTACACGATAGTGGTCGTGCGC- |
| | | TTTTTTTTcagccaactccaaTTTTTTTT- |
| | | GCGCACGACCACTATCGTGTAGG |
| SOX6 | 1243 | -GTGATAGTTAGCAA-GTTTTAGAGCTA- |
| | | CCTACACGATAGTGGTCGTGCGC- |
| | | TTTTTTTTcagccaactccaaTTTTTTTT- |
| | | GCGCACGACCACTATCGTGTAGG |
| SOX6 | 1244 | g-TGAAAAAGAACTCC-GTTTTAGAGCTA- |
| | | CCTACACGATAGTGGTCGTGCGC- |
| | | TTTTTTTTcagccaactccaaTTTTTTTT- |
| | | GCGCACGACCACTATCGTGTAGG |
| SOX6 | 1245 | g-ATAAGCTCAAAAGC-GTTTTAGAGCTA- |
| | | CCTACACGATAGTGGTCGTGCGC- |
| | | TTTTTTTTcagccaactccaaTTTTTTTT- |
| | | GCGCACGACCACTATCGTGTAGG |
| SOX6 | 1246 | g-AGTTGGAGTTACTA-GTTTTAGAGCTA- |
| | | CCTACACGATAGTGGTCGTGCGC- |
| | | TTTTTTTTcagccaactccaaTTTTTTTT- |
| | | GCGCACGACCACTATCGTGTAGG |
| SOX6 | 1247 | g-TTCAAGGACATGAA-GTTTTAGAGCTA- |
| | | CCTACACGATAGTGGTCGTGCGC- |
| | | TTTTTTTTcagccaactccaaTTTTTTTT- |
| | | GCGCACGACCACTATCGTGTAGG |
| SOX6 | 1248 | g-AACTACACTCAGTT-GTTTTAGAGCTA- |
| | | CCTACACGATAGTGGTCGTGCGC- |
| | | TTTTTTTTcagccaactccaaTTTTTTTT- |
| | | GCGCACGACCACTATCGTGTAGG |
| SOX6 | 1249 | -GGGTTCCACGCCTT-GTTTTAGAGCTA- |
| | | CCTACACGATAGTGGTCGTGCGC- |
| | | TTTTTTTTcagccaactccaaTTTTTTTT- |
| | | GCGCACGACCACTATCGTGTAGG |
| SOX6 | 1250 | -GTTTGTTCTACCTA-GTTTTAGAGCTA- |
| | | CCTACACGATAGTGGTCGTGCGC- |
| | | TTTTTTTTcagccaactccaaTTTTTTTT- |
| | | GCGCACGACCACTATCGTGTAGG |
| SOX6 | 1251 | -GAGCAAAACAATTT-GTTTTAGAGCTA- |
| | | CCTACACGATAGTGGTCGTGCGC- |
| | | TTTTTTTTcagccaactccaaTTTTTTTT- |
| | | GCGCACGACCACTATCGTGTAGG |
| SOX6 | 1252 | g-TAAATGTGCCTGAC-GTTTTAGAGCTA- |
| | | CCTACACGATAGTGGTCGTGCGC- |
| | | TTTTTTTTcagccaactccaaTTTTTTTT- |
| | | GCGCACGACCACTATCGTGTAGG |
| SOX6 | 1253 | g-TGATGTTGCACGAC-GTTTTAGAGCTA- |
| | | CCTACACGATAGTGGTCGTGCGC- |
| | | TTTTTTTTcagccaactccaaTTTTTTTT- |
| | | GCGCACGACCACTATCGTGTAGG |
| SOX6 | 1254 | g-TGAAGCAACTACTA-GTTTTAGAGCTA- |
| | | CCTACACGATAGTGGTCGTGCGC- |
| | | TTTTTTTTcagccaactccaaTTTTTTTT- |
| | | GCGCACGACCACTATCGTGTAGG |
| SOX6 | 1255 | g-ATCGGCGAGACCAG-GTTTTAGAGCTA- |
| | | CCTACACGATAGTGGTCGTGCGC- |
| | | TTTTTTTTcagccaactccaaTTTTTTTT- |
| | | GCGCACGACCACTATCGTGTAGG |
| SOX6 | 1256 | g-TGAGACAAGAGGCG-GTTTTAGAGCTA- |
| | | CCTACACGATAGTGGTCGTGCGC- |
| | | TTTTTTTTcagccaactccaaTTTTTTTT- |
| | | GCGCACGACCACTATCGTGTAGG |
| SOX6 | 1257 | g-CCAAATGCAAGGAT-GTTTTAGAGCTA- |
| | | CCCTGGCGGAACGTTCGAGTAAT- |
| | | TTTTTTTTcagccaactccaaTTTTTTTT- |
| | | ATTACTCGAACGTTCCGCCAGGG |
| SOX6 | 1258 | g-CCAATCCTTGCATT-GTTTTAGAGCTA- |
| | | CCCTGGCGGAACGTTCGAGTAAT- |
| | | TTTTTTTTcagccaactccaaTTTTTTTT- |
| | | ATTACTCGAACGTTCCGCCAGGG |
| SOX6 | 1259 | -GTGATAGTTAGCAA-GTTTTAGAGCTA- |
| | | CCCTGGCGGAACGTTCGAGTAAT- |
| | | TTTTTTTTcagccaactccaaTTTTTTTT- |
| | | ATTACTCGAACGTTCCGCCAGGG |
| SOX6 | 1260 | g-TGAAAAAGAACTCC-GTTTTAGAGCTA- |
| | | CCCTGGCGGAACGTTCGAGTAAT- |
| | | TTTTTTTTcagccaactccaaTTTTTTTT- |
| | | ATTACTCGAACGTTCCGCCAGGG |
| SOX6 | 1261 | g-ATAAGCTCAAAAGC-GTTTTAGAGCTA- |
| | | CCCTGGCGGAACGTTCGAGTAAT- |
| | | TTTTTTTTcagccaactccaaTTTTTTTT- |
| | | ATTACTCGAACGTTCCGCCAGGG |
| SOX6 | 1262 | g-AGTTGGAGTTACTA-GTTTTAGAGCTA- |
| | | CCCTGGCGGAACGTTCGAGTAAT- |
| | | TTTTTTTTcagccaactccaaTTTTTTTT- |
| | | ATTACTCGAACGTTCCGCCAGGG |
| SOX6 | 1263 | g-TTCAAGGACATGAA-GTTTTAGAGCTA- |
| | | CCCTGGCGGAACGTTCGAGTAAT- |
| | | TTTTTTTTcagccaactccaaTTTTTTTT- |
| | | ATTACTCGAACGTTCCGCCAGGG |
| SOX6 | 1264 | g-AACTACACTCAGTT-GTTTTAGAGCTA- |
| | | CCCTGGCGGAACGTTCGAGTAAT- |
| | | TTTTTTTTcagccaactccaaTTTTTTTT- |
| | | ATTACTCGAACGTTCCGCCAGGG |
| SOX6 | 1265 | -GGGTTCCACGCCTT-GTTTTAGAGCTA- |
| | | CCCTGGCGGAACGTTCGAGTAAT- |
| | | TTTTTTTTcagccaactccaaTTTTTTTT- |
| | | ATTACTCGAACGTTCCGCCAGGG |
| SOX6 | 1266 | -GTTTGTTCTACCTA-GTTTTAGAGCTA- |
| | | CCCTGGCGGAACGTTCGAGTAAT- |
| | | TTTTTTTTcagccaactccaaTTTTTTTT- |
| | | ATTACTCGAACGTTCCGCCAGGG |
| SOX6 | 1267 | -GAGCAAAACAATTT-GTTTTAGAGCTA- |
| | | CCCTGGCGGAACGTTCGAGTAAT- |
| | | TTTTTTTTcagccaactccaaTTTTTTTT- |
| | | ATTACTCGAACGTTCCGCCAGGG |
| SOX6 | 1268 | g-TAAATGTGCCTGAC-GTTTTAGAGCTA- |
| | | CCCTGGCGGAACGTTCGAGTAAT- |
| | | TTTTTTTTcagccaactccaaTTTTTTTT- |
| | | ATTACTCGAACGTTCCGCCAGGG |
| SOX6 | 1269 | g-TGATGTTGCACGAC-GTTTTAGAGCTA- |
| | | CCCTGGCGGAACGTTCGAGTAAT- |
| | | TTTTTTTTcagccaactccaaTTTTTTTT- |
| | | ATTACTCGAACGTTCCGCCAGGG |
| SOX6 | 1270 | g-TGAAGCAACTACTA-GTTTTAGAGCTA- |
| | | CCCTGGCGGAACGTTCGAGTAAT- |
| | | TTTTTTTTcagccaactccaaTTTTTTTT- |
| | | ATTACTCGAACGTTCCGCCAGGG |
| SOX6 | 1271 | g-ATCGGCGAGACCAG-GTTTTAGAGCTA- |
| | | CCCTGGCGGAACGTTCGAGTAAT- |
| | | TTTTTTTTcagccaactccaaTTTTTTTT- |
| | | ATTACTCGAACGTTCCGCCAGGG |
| SOX6 | 1272 | g-TGAGACAAGAGGCG-GTTTTAGAGCTA- |
| | | CCCTGGCGGAACGTTCGAGTAAT- |
| | | TTTTTTTTcagccaactccaaTTTTTTTT- |
| | | ATTACTCGAACGTTCCGCCAGGG |
| SOX6 | 1273 | g-CCAAATGCAAGGAT-GTTTTAGAGCTA- |
| | | CCTACACTCGACATCGGTAGCTA- |
| | | TTTTTTTTcagccaactccaaTTTTTTTT- |
| | | TAGCTACCGATGTCGAGTGTAGG |
| SOX6 | 1274 | g-CCAATCCTTGCATT-GTTTTAGAGCTA- |
| | | CCTACACTCGACATCGGTAGCTA- |
| | | TTTTTTTTcagccaactccaaTTTTTTTT- |
| | | TAGCTACCGATGTCGAGTGTAGG |
| SOX6 | 1275 | -GTGATAGTTAGCAA-GTTTTAGAGCTA- |
| | | CCTACACTCGACATCGGTAGCTA- |
| | | TTTTTTTTcagccaactccaaTTTTTTTT- |
| | | TAGCTACCGATGTCGAGTGTAGG |
| SOX6 | 1276 | g-TGAAAAAGAACTCC-GTTTTAGAGCTA- |
| | | CCTACACTCGACATCGGTAGCTA- |
| | | TTTTTTTTcagccaactccaaTTTTTTTT- |
| | | TAGCTACCGATGTCGAGTGTAGG |
| SOX6 | 1277 | g-ATAAGCTCAAAAGC-GTTTTAGAGCTA- |
| | | CCTACACTCGACATCGGTAGCTA- |
| | | TTTTTTTTcagccaactccaaTTTTTTTT- |
| | | TAGCTACCGATGTCGAGTGTAGG |
| SOX6 | 1278 | g-AGTTGGAGTTACTA-GTTTTAGAGCTA- |
| | | CCTACACTCGACATCGGTAGCTA- |
| | | TTTTTTTTcagccaactccaaTTTTTTTT- |
| | | TAGCTACCGATGTCGAGTGTAGG |
| SOX6 | 1279 | g-TTCAAGGACATGAA-GTTTTAGAGCTA- |
| | | CCTACACTCGACATCGGTAGCTA- |
| | | TTTTTTTTcagccaactccaaTTTTTTTT- |
| | | TAGCTACCGATGTCGAGTGTAGG |
| SOX6 | 1280 | g-AACTACACTCAGTT-GTTTTAGAGCTA- |
| | | CCTACACTCGACATCGGTAGCTA- |
| | | TTTTTTTTcagccaactccaaTTTTTTTT- |
| | | TAGCTACCGATGTCGAGTGTAGG |
| SOX6 | 1281 | -GGGTTCCACGCCTT-GTTTTAGAGCTA- |
| | | CCTACACTCGACATCGGTAGCTA- |
| | | TTTTTTTTcagccaactccaaTTTTTTTT- |
| | | TAGCTACCGATGTCGAGTGTAGG |
| SOX6 | 1282 | -GTTTGTTCTACCTA-GTTTTAGAGCTA- |
| | | CCTACACTCGACATCGGTAGCTA- |
| | | TTTTTTTTcagccaactccaaTTTTTTTT- |
| | | TAGCTACCGATGTCGAGTGTAGG |
| SOX6 | 1283 | -GAGCAAAACAATTT-GTTTTAGAGCTA- |
| | | CCTACACTCGACATCGGTAGCTA- |
| | | TTTTTTTTcagccaactccaaTTTTTTTT- |
| | | TAGCTACCGATGTCGAGTGTAGG |
| SOX6 | 1284 | g-TAAATGTGCCTGAC-GTTTTAGAGCTA- |
| | | CCTACACTCGACATCGGTAGCTA- |
| | | TTTTTTTTcagccaactccaaTTTTTTTT- |
| | | TAGCTACCGATGTCGAGTGTAGG |
| SOX6 | 1285 | g-TGATGTTGCACGAC-GTTTTAGAGCTA- |
| | | CCTACACTCGACATCGGTAGCTA- |
| | | TTTTTTTTcagccaactccaaTTTTTTTT- |
| | | TAGCTACCGATGTCGAGTGTAGG |
| SOX6 | 1286 | g-TGAAGCAACTACTA-GTTTTAGAGCTA- |
| | | CCTACACTCGACATCGGTAGCTA- |
| | | TTTTTTTTcagccaactccaaTTTTTTTT- |
| | | TAGCTACCGATGTCGAGTGTAGG |
| SOX6 | 1287 | g-ATCGGCGAGACCAG-GTTTTAGAGCTA- |
| | | CCTACACTCGACATCGGTAGCTA- |
| | | TTTTTTTTcagccaactccaaTTTTTTTT- |
| | | TAGCTACCGATGTCGAGTGTAGG |
| SOX6 | 1288 | g-TGAGACAAGAGGCG-GTTTTAGAGCTA- |
| | | CCTACACTCGACATCGGTAGCTA- |
| | | TTTTTTTTcagccaactccaaTTTTTTTT- |
| | | TAGCTACCGATGTCGAGTGTAGG |
| SOX8 | 1289 | g-CTCAGGCGCGAGAC-GTTTTAGAGCTA- |
| | | CCGTCGTTGTACCGTCTACTTGAC- |
| | | TTTTTTTTcagccaactccaaTTTTTTTT- |
| | | GTCAAGTAGACGGTACAACGACGG |
| SOX8 | 1290 | -GCTTTCTTTATGGG-GTTTTAGAGCTA- |
| | | CCGTCGTTGTACCGTCTACTTGAC- |
| | | TTTTTTTTcagccaactccaaTTTTTTTT- |
| | | GTCAAGTAGACGGTACAACGACGG |
| SOX8 | 1291 | g-AGGTCGCCGCGCGG-GTTTTAGAGCTA- |
| | | CCGTCGTTGTACCGTCTACTTGAC- |
| | | TTTTTTTTcagccaactccaaTTTTTTTT- |
| | | GTCAAGTAGACGGTACAACGACGG |
| SOX8 | 1292 | -gcccggcTACCCAT-GTTTTAGAGCTA- |
| | | CCGTCGTTGTACCGTCTACTTGAC- |
| | | TTTTTTTTcagccaactccaaTTTTTTTT- |
| | | GTCAAGTAGACGGTACAACGACGG |
| SOX8 | 1293 | g-CTCAGGCGCGAGAC-GTTTTAGAGCTA- |
| | | CCTTCCCGACTTCCGTAGGAGCGC- |
| | | TTTTTTTTcagccaactccaaTTTTTTTT- |
| | | GCGCTCCTACGGAAGTCGGGAAGG |
| SOX8 | 1294 | -GCTTTCTTTATGGG-GTTTTAGAGCTA- |
| | | CCTTCCCGACTTCCGTAGGAGCGC- |
| | | TTTTTTTTcagccaactccaaTTTTTTTT- |
| | | GCGCTCCTACGGAAGTCGGGAAGG |
| SOX8 | 1295 | g-AGGTCGCCGCGCGG-GTTTTAGAGCTA- |
| | | CCTTCCCGACTTCCGTAGGAGCGC- |
| | | TTTTTTTTcagccaactccaaTTTTTTTT- |
| | | GCGCTCCTACGGAAGTCGGGAAGG |
| SOX8 | 1296 | -gcccggcTACCCAT-GTTTTAGAGCTA- |
| | | CCTTCCCGACTTCCGTAGGAGCGC- |
| | | TTTTTTTTcagccaactccaaTTTTTTTT- |
| | | GCGCTCCTACGGAAGTCGGGAAGG |
| SOX8 | 1297 | g-CTCAGGCGCGAGAC-GTTTTAGAGCTA- |
| | | CCTGAAGGTAAAGATCGGGTCCTC- |
| | | TTTTTTTTcagccaactccaaTTTTTTTT- |
| | | GAGGACCCGATCTTTACCTTCAGG |
| SOX8 | 1298 | -GCTTTCTTTATGGG-GTTTTAGAGCTA- |
| | | CCTGAAGGTAAAGATCGGGTCCTC- |
| | | TTTTTTTTcagccaactccaaTTTTTTTT- |
| | | GAGGACCCGATCTTTACCTTCAGG |
| SOX8 | 1299 | g-AGGTCGCCGCGCGG-GTTTTAGAGCTA- |
| | | CCTGAAGGTAAAGATCGGGTCCTC- |
| | | TTTTTTTTcagccaactccaaTTTTTTTT- |
| | | GAGGACCCGATCTTTACCTTCAGG |
| SOX8 | 1300 | -gcccggcTACCCAT-GTTTTAGAGCTA- |
| | | CCTGAAGGTAAAGATCGGGTCCTC- |
| | | TTTTTTTTcagccaactccaaTTTTTTTT- |
| | | GAGGACCCGATCTTTACCTTCAGG |
| SOX8 | 1301 | g-CTCAGGCGCGAGAC-GTTTTAGAGCTA- |
| | | CCTGGTTATAGCGGACGCACTGT- |
| | | TTTTTTTTcagccaactccaaTTTTTTTT- |
| | | ACAGTGCGTCCGCTATAACCAGG |
| SOX8 | 1302 | -GCTTTCTTTATGGG-GTTTTAGAGCTA- |
| | | CCTGGTTATAGCGGACGCACTGT- |
| | | TTTTTTTTcagccaactccaaTTTTTTTT- |
| | | ACAGTGCGTCCGCTATAACCAGG |
| SOX8 | 1303 | g-AGGTCGCCGCGCGG-GTTTTAGAGCTA- |
| | | CCTGGTTATAGCGGACGCACTGT- |
| | | TTTTTTTTcagccaactccaaTTTTTTTT- |
| | | ACAGTGCGTCCGCTATAACCAGG |
| SOX8 | 1304 | -gcccggcTACCCAT-GTTTTAGAGCTA- |
| | | CCTGGTTATAGCGGACGCACTGT- |
| | | TTTTTTTTcagccaactccaaTTTTTTTT- |
| | | ACAGTGCGTCCGCTATAACCAGG |
| SOX8 | 1305 | g-CTCAGGCGCGAGAC-GTTTTAGAGCTA- |
| | | CCGCATCGTATTATCTGCGAAGC- |
| | | TTTTTTTTcagccaactccaaTTTTTTTT- |
| | | GCTTCGCAGATAATACGATGCGG |
| SOX8 | 1306 | -GCTTTCTTTATGGG-GTTTTAGAGCTA- |
| | | CCGCATCGTATTATCTGCGAAGC- |
| | | TTTTTTTTcagccaactccaaTTTTTTTT- |
| | | GCTTCGCAGATAATACGATGCGG |
| SOX8 | 1307 | g-AGGTCGCCGCGCGG-GTTTTAGAGCTA- |
| | | CCGCATCGTATTATCTGCGAAGC- |
| | | TTTTTTTTcagccaactccaaTTTTTTTT- |
| | | GCTTCGCAGATAATACGATGCGG |
| SOX8 | 1308 | -gcccggcTACCCAT-GTTTTAGAGCTA- |
| | | CCGCATCGTATTATCTGCGAAGC- |
| | | TTTTTTTTcagccaactccaaTTTTTTTT- |
| | | GCTTCGCAGATAATACGATGCGG |
| SOX8 | 1309 | g-CTCAGGCGCGAGAC-GTTTTAGAGCTA- |
| | | CCGCTAGGACGTTCAACGGAGTC- |
| | | TTTTTTTTcagccaactccaaTTTTTTTT- |
| | | GACTCCGTTGAACGTCCTAGCGG |
| SOX8 | 1310 | -GCTTTCTTTATGGG-GTTTTAGAGCTA- |
| | | CCGCTAGGACGTTCAACGGAGTC- |
| | | TTTTTTTTcagccaactccaaTTTTTTTT- |
| | | GACTCCGTTGAACGTCCTAGCGG |
| SOX8 | 1311 | g-AGGTCGCCGCGCGG-GTTTTAGAGCTA- |
| | | CCGCTAGGACGTTCAACGGAGTC- |
| | | TTTTTTTTcagccaactccaaTTTTTTTT- |
| | | GACTCCGTTGAACGTCCTAGCGG |
| SOX8 | 1312 | -gcccggcTACCCAT-GTTTTAGAGCTA- |
| | | CCGCTAGGACGTTCAACGGAGTC- |
| | | TTTTTTTTcagccaactccaaTTTTTTTT- |
| | | GACTCCGTTGAACGTCCTAGCGG |
| SOX8 | 1313 | g-CTCAGGCGCGAGAC-GTTTTAGAGCTA- |
| | | CCATAGCGGTACTATCGGCATCT- |
| | | TTTTTTTTcagccaactccaaTTTTTTTT- |
| | | AGATGCCGATAGTACCGCTATGG |
| SOX8 | 1314 | -GCTTTCTTTATGGG-GTTTTAGAGCTA- |
| | | CCATAGCGGTACTATCGGCATCT- |
| | | TTTTTTTTcagccaactccaaTTTTTTTT- |
| | | AGATGCCGATAGTACCGCTATGG |
| SOX8 | 1315 | g-AGGTCGCCGCGCGG-GTTTTAGAGCTA- |
| | | CCATAGCGGTACTATCGGCATCT- |
| | | TTTTTTTTcagccaactccaaTTTTTTTT- |
| | | AGATGCCGATAGTACCGCTATGG |
| SOX8 | 1316 | -gcccggcTACCCAT-GTTTTAGAGCTA- |
| | | CCATAGCGGTACTATCGGCATCT- |
| | | TTTTTTTTcagccaactccaaTTTTTTTT- |
| | | AGATGCCGATAGTACCGCTATGG |
| SOX8 | 1317 | g-CTCAGGCGCGAGAC-GTTTTAGAGCTA- |
| | | CCTCGTACTAGTCTCGCATGACC- |
| | | TTTTTTTTcagccaactccaaTTTTTTTT- |
| | | GGTCATGCGAGACTAGTACGAGG |
| SOX8 | 1318 | -GCTTTCTTTATGGG-GTTTTAGAGCTA- |
| | | CCTCGTACTAGTCTCGCATGACC- |
| | | TTTTTTTTcagccaactccaaTTTTTTTT- |
| | | GGTCATGCGAGACTAGTACGAGG |
| SOX8 | 1319 | g-AGGTCGCCGCGCGG-GTTTTAGAGCTA- |
| | | CCTCGTACTAGTCTCGCATGACC- |
| | | TTTTTTTTcagccaactccaaTTTTTTTT- |
| | | GGTCATGCGAGACTAGTACGAGG |
| SOX8 | 1320 | -gcccggcTACCCAT-GTTTTAGAGCTA- |
| | | CCTCGTACTAGTCTCGCATGACC- |
| | | TTTTTTTTcagccaactccaaTTTTTTTT- |
| | | GGTCATGCGAGACTAGTACGAGG |
| SOX8 | 1321 | g-CTCAGGCGCGAGAC-GTTTTAGAGCTA- |
| | | CCGATAGTGCTAAACGACGCTTT- |
| | | TTTTTTTTcagccaactccaaTTTTTTTT- |
| | | AAAGCGTCGTTTAGCACTATCGG |
| SOX8 | 1322 | -GCTTTCTTTATGGG-GTTTTAGAGCTA- |
| | | CCGATAGTGCTAAACGACGCTTT- |
| | | TTTTTTTTcagccaactccaaTTTTTTTT- |
| | | AAAGCGTCGTTTAGCACTATCGG |
| SOX8 | 1323 | g-AGGTCGCCGCGCGG-GTTTTAGAGCTA- |
| | | CCGATAGTGCTAAACGACGCTTT- |
| | | TTTTTTTTcagccaactccaaTTTTTTTT- |
| | | AAAGCGTCGTTTAGCACTATCGG |
| SOX8 | 1324 | -gcccggcTACCCAT-GTTTTAGAGCTA- |
| | | CCGATAGTGCTAAACGACGCTTT- |
| | | TTTTTTTTcagccaactccaaTTTTTTTT- |
| | | AAAGCGTCGTTTAGCACTATCGG |
| SOX8 | 1325 | g-CTCAGGCGCGAGAC-GTTTTAGAGCTA- |
| | | CCCGTTATCGACGTTCAAGGAAC- |
| | | TTTTTTTTcagccaactccaaTTTTTTTT- |
| | | GTTCCTTGAACGTCGATAACGGG |
| SOX8 | 1326 | -GCTTTCTTTATGGG-GTTTTAGAGCTA- |
| | | CCCGTTATCGACGTTCAAGGAAC- |
| | | TTTTTTTTcagccaactccaaTTTTTTTT- |
| | | GTTCCTTGAACGTCGATAACGGG |
| SOX8 | 1327 | g-AGGTCGCCGCGCGG-GTTTTAGAGCTA- |
| | | CCCGTTATCGACGTTCAAGGAAC- |
| | | TTTTTTTTcagccaactccaaTTTTTTTT- |
| | | GTTCCTTGAACGTCGATAACGGG |
| SOX8 | 1328 | -gcccggcTACCCAT-GTTTTAGAGCTA- |
| | | CCCGTTATCGACGTTCAAGGAAC- |
| | | TTTTTTTTcagccaactccaaTTTTTTTT- |
| | | GTTCCTTGAACGTCGATAACGGG |
| SOX8 | 1329 | g-CTCAGGCGCGAGAC-GTTTTAGAGCTA- |
| | | CCGATCAATGCGGTCTGCGTAAC- |
| | | TTTTTTTTcagccaactccaaTTTTTTTT- |
| | | GTTACGCAGACCGCATTGATCGG |
| SOX8 | 1330 | -GCTTTCTTTATGGG-GTTTTAGAGCTA- |
| | | CCGATCAATGCGGTCTGCGTAAC- |
| | | TTTTTTTTcagccaactccaaTTTTTTTT- |
| | | GTTACGCAGACCGCATTGATCGG |
| SOX8 | 1331 | g-AGGTCGCCGCGCGG-GTTTTAGAGCTA- |
| | | CCGATCAATGCGGTCTGCGTAAC- |
| | | TTTTTTTTcagccaactccaaTTTTTTTT- |
| | | GTTACGCAGACCGCATTGATCGG |
| SOX8 | 1332 | -gcccggcTACCCAT-GTTTTAGAGCTA- |
| | | CCGATCAATGCGGTCTGCGTAAC- |
| | | TTTTTTTTcagccaactccaaTTTTTTTT- |
| | | GTTACGCAGACCGCATTGATCGG |
| SOX8 | 1333 | g-CTCAGGCGCGAGAC-GTTTTAGAGCTA- |
| | | CCCTTACTCGCGATACTCTCGAC- |
| | | TTTTTTTTcagccaactccaaTTTTTTTT- |
| | | GTCGAGAGTATCGCGAGTAAGGG |
| SOX8 | 1334 | -GCTTTCTTTATGGG-GTTTTAGAGCTA- |
| | | CCCTTACTCGCGATACTCTCGAC- |
| | | TTTTTTTTcagccaactccaaTTTTTTTT- |
| | | GTCGAGAGTATCGCGAGTAAGGG |
| SOX8 | 1335 | g-AGGTCGCCGCGCGG-GTTTTAGAGCTA- |
| | | CCCTTACTCGCGATACTCTCGAC- |
| | | TTTTTTTTcagccaactccaaTTTTTTTT- |
| | | GTCGAGAGTATCGCGAGTAAGGG |
| SOX8 | 1336 | -gcccggcTACCCAT-GTTTTAGAGCTA- |
| | | CCCTTACTCGCGATACTCTCGAC- |
| | | TTTTTTTTcagccaactccaaTTTTTTTT- |
| | | GTCGAGAGTATCGCGAGTAAGGG |
| SOX8 | 1337 | g-CTCAGGCGCGAGAC-GTTTTAGAGCTA- |
| | | CCGCGGACGGTAAGCACGGAATA- |
| | | TTTTTTTTcagccaactccaaTTTTTTTT- |
| | | TATTCCGTGCTTACCGTCCGCGG |
| SOX8 | 1338 | -GCTTTCTTTATGGG-GTTTTAGAGCTA- |
| | | CCGCGGACGGTAAGCACGGAATA- |
| | | TTTTTTTTcagccaactccaaTTTTTTTT- |
| | | TATTCCGTGCTTACCGTCCGCGG |
| SOX8 | 1339 | g-AGGTCGCCGCGCGG-GTTTTAGAGCTA- |
| | | CCGCGGACGGTAAGCACGGAATA- |
| | | TTTTTTTTcagccaactccaaTTTTTTTT- |
| | | TATTCCGTGCTTACCGTCCGCGG |
| SOX8 | 1340 | -gcccggcTACCCAT-GTTTTAGAGCTA- |
| | | CCGCGGACGGTAAGCACGGAATA- |
| | | TTTTTTTTcagccaactccaaTTTTTTTT- |
| | | TATTCCGTGCTTACCGTCCGCGG |
| SOX8 | 1341 | g-CTCAGGCGCGAGAC-GTTTTAGAGCTA- |
| | | CCTATAGTCACGAATCGTAGGGT- |
| | | TTTTTTTTcagccaactccaaTTTTTTTT- |
| | | ACCCTACGATTCGTGACTATAGG |
| SOX8 | 1342 | -GCTTTCTTTATGGG-GTTTTAGAGCTA- |
| | | CCTATAGTCACGAATCGTAGGGT- |
| | | TTTTTTTTcagccaactccaaTTTTTTTT- |
| | | ACCCTACGATTCGTGACTATAGG |
| SOX8 | 1343 | g-AGGTCGCCGCGCGG-GTTTTAGAGCTA- |
| | | CCTATAGTCACGAATCGTAGGGT- |
| | | TTTTTTTTcagccaactccaaTTTTTTTT- |
| | | ACCCTACGATTCGTGACTATAGG |
| SOX8 | 1344 | -gcccggcTACCCAT-GTTTTAGAGCTA- |
| | | CCTATAGTCACGAATCGTAGGGT- |
| | | TTTTTTTTcagccaactccaaTTTTTTTT- |
| | | ACCCTACGATTCGTGACTATAGG |
| SOX8 | 1345 | g-CTCAGGCGCGAGAC-GTTTTAGAGCTA- |
| | | CCCGTCGTCACGTATGCGTAGCA- |
| | | TTTTTTTTcagccaactccaaTTTTTTTT- |
| | | TGCTACGCATACGTGACGACGGG |
| SOX8 | 1346 | -GCTTTCTTTATGGG-GTTTTAGAGCTA- |
| | | CCCGTCGTCACGTATGCGTAGCA- |
| | | TTTTTTTTcagccaactccaaTTTTTTTT- |
| | | TGCTACGCATACGTGACGACGGG |
| SOX8 | 1347 | g-AGGTCGCCGCGCGG-GTTTTAGAGCTA- |
| | | CCCGTCGTCACGTATGCGTAGCA- |
| | | TTTTTTTTcagccaactccaaTTTTTTTT- |
| | | TGCTACGCATACGTGACGACGGG |
| SOX8 | 1348 | -gcccggcTACCCAT-GTTTTAGAGCTA- |
| | | CCCGTCGTCACGTATGCGTAGCA- |
| | | TTTTTTTTcagccaactccaaTTTTTTTT- |
| | | TGCTACGCATACGTGACGACGGG |
| SOX8 | 1349 | g-CTCAGGCGCGAGAC-GTTTTAGAGCTA- |
| | | CCCGAGAGGTAGTAGACGACGCA- |
| | | TTTTTTTTcagccaactccaaTTTTTTTT- |
| | | TGCGTCGTCTACTACCTCTCGGG |
| SOX8 | 1350 | -GCTTTCTTTATGGG-GTTTTAGAGCTA- |
| | | CCCGAGAGGTAGTAGACGACGCA- |
| | | TTTTTTTTcagccaactccaaTTTTTTTT- |
| | | TGCGTCGTCTACTACCTCTCGGG |
| SOX8 | 1351 | g-AGGTCGCCGCGCGG-GTTTTAGAGCTA- |
| | | CCCGAGAGGTAGTAGACGACGCA- |
| | | TTTTTTTTcagccaactccaaTTTTTTTT- |
| | | TGCGTCGTCTACTACCTCTCGGG |
| SOX8 | 1352 | -gcccggcTACCCAT-GTTTTAGAGCTA- |
| | | CCCGAGAGGTAGTAGACGACGCA- |
| | | TTTTTTTTcagccaactccaaTTTTTTTT- |
| | | TGCGTCGTCTACTACCTCTCGGG |
| SOX8 | 1353 | g-CTCAGGCGCGAGAC-GTTTTAGAGCTA- |
| | | CCGACGTCTACGGACGGGAGCTA- |
| | | TTTTTTTTcagccaactccaaTTTTTTTT- |
| | | TAGCTCCCGTCCGTAGACGTCGG |
| SOX8 | 1354 | -GCTTTCTTTATGGG-GTTTTAGAGCTA- |
| | | CCGACGTCTACGGACGGGAGCTA- |
| | | TTTTTTTTcagccaactccaaTTTTTTTT- |
| | | TAGCTCCCGTCCGTAGACGTCGG |
| SOX8 | 1355 | g-AGGTCGCCGCGCGG-GTTTTAGAGCTA- |
| | | CCGACGTCTACGGACGGGAGCTA- |
| | | TTTTTTTTcagccaactccaaTTTTTTTT- |
| | | TAGCTCCCGTCCGTAGACGTCGG |
| SOX8 | 1356 | -gcccggcTACCCAT-GTTTTAGAGCTA- |
| | | CCGACGTCTACGGACGGGAGCTA- |
| | | TTTTTTTTcagccaactccaaTTTTTTTT- |
| | | TAGCTCCCGTCCGTAGACGTCGG |
| SOX8 | 1357 | g-CTCAGGCGCGAGAC-GTTTTAGAGCTA- |
| | | CCAAAGCTCATTCGCGACTGAGC- |
| | | TTTTTTTTcagccaactccaaTTTTTTTT- |
| | | GCTCAGTCGCGAATGAGCTTTGG |
| SOX8 | 1358 | -GCTTTCTTTATGGG-GTTTTAGAGCTA- |
| | | CCAAAGCTCATTCGCGACTGAGC- |
| | | TTTTTTTTcagccaactccaaTTTTTTTT- |
| | | GCTCAGTCGCGAATGAGCTTTGG |
| SOX8 | 1359 | g-AGGTCGCCGCGCGG-GTTTTAGAGCTA- |
| | | CCAAAGCTCATTCGCGACTGAGC- |
| | | TTTTTTTTcagccaactccaaTTTTTTTT- |
| | | GCTCAGTCGCGAATGAGCTTTGG |
| SOX8 | 1360 | -gcccggcTACCCAT-GTTTTAGAGCTA- |
| | | CCAAAGCTCATTCGCGACTGAGC- |
| | | TTTTTTTTcagccaactccaaTTTTTTTT- |
| | | GCTCAGTCGCGAATGAGCTTTGG |
| SOX8 | 1361 | g-CTCAGGCGCGAGAC-GTTTTAGAGCTA- |
| | | CCATGGCACGATCGACACGGAGG- |
| | | TTTTTTTTcagccaactccaaTTTTTTTT- |
| | | CCTCCGTGTCGATCGTGCCATGG |
| SOX8 | 1362 | -GCTTTCTTTATGGG-GTTTTAGAGCTA- |
| | | CCATGGCACGATCGACACGGAGG- |
| | | TTTTTTTTcagccaactccaaTTTTTTTT- |
| | | CCTCCGTGTCGATCGTGCCATGG |
| SOX8 | 1363 | g-AGGTCGCCGCGCGG-GTTTTAGAGCTA- |
| | | CCATGGCACGATCGACACGGAGG- |
| | | TTTTTTTTcagccaactccaaTTTTTTTT- |
| | | CCTCCGTGTCGATCGTGCCATGG |
| SOX8 | 1364 | -gcccggcTACCCAT-GTTTTAGAGCTA- |
| | | CCATGGCACGATCGACACGGAGG- |
| | | TTTTTTTTcagccaactccaaTTTTTTTT- |
| | | CCTCCGTGTCGATCGTGCCATGG |
| SOX8 | 1365 | g-CTCAGGCGCGAGAC-GTTTTAGAGCTA- |
| | | CCCGAACTCTCTATCGAACGAGT- |
| | | TTTTTTTTcagccaactccaaTTTTTTTT- |
| | | ACTCGTTCGATAGAGAGTTCGGG |
| SOX8 | 1366 | -GCTTTCTTTATGGG-GTTTTAGAGCTA- |
| | | CCCGAACTCTCTATCGAACGAGT- |
| | | TTTTTTTTcagccaactccaaTTTTTTTT- |
| | | ACTCGTTCGATAGAGAGTTCGGG |
| SOX8 | 1367 | g-AGGTCGCCGCGCGG-GTTTTAGAGCTA- |
| | | CCCGAACTCTCTATCGAACGAGT- |
| | | TTTTTTTTcagccaactccaaTTTTTTTT- |
| | | ACTCGTTCGATAGAGAGTTCGGG |
| SOX8 | 1368 | -gcccggcTACCCAT-GTTTTAGAGCTA- |
| | | CCCGAACTCTCTATCGAACGAGT- |
| | | TTTTTTTTcagccaactccaaTTTTTTTT- |
| | | ACTCGTTCGATAGAGAGTTCGGG |
| SOX8 | 1369 | g-CTCAGGCGCGAGAC-GTTTTAGAGCTA- |
| | | CCTACACGATAGTGGTCGTGCGC- |
| | | TTTTTTTTcagccaactccaaTTTTTTTT- |
| | | GCGCACGACCACTATCGTGTAGG |
| SOX8 | 1370 | -GCTTTCTTTATGGG-GTTTTAGAGCTA- |
| | | CCTACACGATAGTGGTCGTGCGC- |
| | | TTTTTTTTcagccaactccaaTTTTTTTT- |
| | | GCGCACGACCACTATCGTGTAGG |
| SOX8 | 1371 | g-AGGTCGCCGCGCGG-GTTTTAGAGCTA- |
| | | CCTACACGATAGTGGTCGTGCGC- |
| | | TTTTTTTTcagccaactccaaTTTTTTTT- |
| | | GCGCACGACCACTATCGTGTAGG |
| SOX8 | 1372 | -gcccggcTACCCAT-GTTTTAGAGCTA- |
| | | CCTACACGATAGTGGTCGTGCGC- |
| | | TTTTTTTTcagccaactccaaTTTTTTTT- |
| | | GCGCACGACCACTATCGTGTAGG |
| SOX8 | 1373 | g-CTCAGGCGCGAGAC-GTTTTAGAGCTA- |
| | | CCCTGGCGGAACGTTCGAGTAAT- |
| | | TTTTTTTTcagccaactccaaTTTTTTTT- |
| | | ATTACTCGAACGTTCCGCCAGGG |
| SOX8 | 1374 | -GCTTTCTTTATGGG-GTTTTAGAGCTA- |
| | | CCCTGGCGGAACGTTCGAGTAAT- |
| | | TTTTTTTTcagccaactccaaTTTTTTTT- |
| | | ATTACTCGAACGTTCCGCCAGGG |
| SOX8 | 1375 | g-AGGTCGCCGCGCGG-GTTTTAGAGCTA- |
| | | CCCTGGCGGAACGTTCGAGTAAT- |
| | | TTTTTTTTcagccaactccaaTTTTTTTT- |
| | | ATTACTCGAACGTTCCGCCAGGG |
| SOX8 | 1376 | -gcccggcTACCCAT-GTTTTAGAGCTA- |
| | | CCCTGGCGGAACGTTCGAGTAAT- |
| | | TTTTTTTTcagccaactccaaTTTTTTTT- |
| | | ATTACTCGAACGTTCCGCCAGGG |
| SOX8 | 1377 | g-CTCAGGCGCGAGAC-GTTTTAGAGCTA- |
| | | CCTACACTCGACATCGGTAGCTA- |
| | | TTTTTTTTcagccaactccaaTTTTTTTT- |
| | | TAGCTACCGATGTCGAGTGTAGG |
| SOX8 | 1378 | -GCTTTCTTTATGGG-GTTTTAGAGCTA- |
| | | CCTACACTCGACATCGGTAGCTA- |
| | | TTTTTTTTcagccaactccaaTTTTTTTT- |
| | | TAGCTACCGATGTCGAGTGTAGG |
| SOX8 | 1379 | g-AGGTCGCCGCGCGG-GTTTTAGAGCTA- |
| | | CCTACACTCGACATCGGTAGCTA- |
| | | TTTTTTTTcagccaactccaaTTTTTTTT- |
| | | TAGCTACCGATGTCGAGTGTAGG |
| SOX8 | 1380 | -gcccggcTACCCAT-GTTTTAGAGCTA- |
| | | CCTACACTCGACATCGGTAGCTA- |
| | | TTTTTTTTcagccaactccaaTTTTTTTT- |
| | | TAGCTACCGATGTCGAGTGTAGG |
| SOX9 | 1381 | g-CAAACTTACACACT-GTTTTAGAGCTA- |
| | | CCGTCGTTGTACCGTCTACTTGAC- |
| | | TTTTTTTTcagccaactccaaTTTTTTTT- |
| | | GTCAAGTAGACGGTACAACGACGG |
| SOX9 | 1382 | g-AAAGGGCGGACGGT-GTTTTAGAGCTA- |
| | | CCGTCGTTGTACCGTCTACTTGAC- |
| | | TTTTTTTTcagccaactccaaTTTTTTTT- |
| | | GTCAAGTAGACGGTACAACGACGG |
| SOX9 | 1383 | g-ATTGGACCCGATTT-GTTTTAGAGCTA- |
| | | CCGTCGTTGTACCGTCTACTTGAC- |
| | | TTTTTTTTcagccaactccaaTTTTTTTT- |
| | | GTCAAGTAGACGGTACAACGACGG |
| SOX9 | 1384 | -GTGGCTCTAAGGTG-GTTTTAGAGCTA- |
| | | CCGTCGTTGTACCGTCTACTTGAC- |
| | | TTTTTTTTcagccaactccaaTTTTTTTT- |
| | | GTCAAGTAGACGGTACAACGACGG |
| SOX9 | 1385 | g-CAAACTTACACACT-GTTTTAGAGCTA- |
| | | CCTTCCCGACTTCCGTAGGAGCGC- |
| | | TTTTTTTTcagccaactccaaTTTTTTTT- |
| | | GCGCTCCTACGGAAGTCGGGAAGG |
| SOX9 | 1386 | g-AAAGGGCGGACGGT-GTTTTAGAGCTA- |
| | | CCTTCCCGACTTCCGTAGGAGCGC- |
| | | TTTTTTTTcagccaactccaaTTTTTTTT- |
| | | GCGCTCCTACGGAAGTCGGGAAGG |
| SOX9 | 1387 | g-ATTGGACCCGATTT-GTTTTAGAGCTA- |
| | | CCTTCCCGACTTCCGTAGGAGCGC- |
| | | TTTTTTTTcagccaactccaaTTTTTTTT- |
| | | GCGCTCCTACGGAAGTCGGGAAGG |
| SOX9 | 1388 | -GTGGCTCTAAGGTG-GTTTTAGAGCTA- |
| | | CCTTCCCGACTTCCGTAGGAGCGC- |
| | | TTTTTTTTcagccaactccaaTTTTTTTT- |
| | | GCGCTCCTACGGAAGTCGGGAAGG |
| SOX9 | 1389 | g-CAAACTTACACACT-GTTTTAGAGCTA- |
| | | CCTGAAGGTAAAGATCGGGTCCTC- |
| | | TTTTTTTTcagccaactccaaTTTTTTTT- |
| | | GAGGACCCGATCTTTACCTTCAGG |
| SOX9 | 1390 | g-AAAGGGCGGACGGT-GTTTTAGAGCTA- |
| | | CCTGAAGGTAAAGATCGGGTCCTC- |
| | | TTTTTTTTcagccaactccaaTTTTTTTT- |
| | | GAGGACCCGATCTTTACCTTCAGG |
| SOX9 | 1391 | g-ATTGGACCCGATTT-GTTTTAGAGCTA- |
| | | CCTGAAGGTAAAGATCGGGTCCTC- |
| | | TTTTTTTTcagccaactccaaTTTTTTTT- |
| | | GAGGACCCGATCTTTACCTTCAGG |
| SOX9 | 1392 | -GTGGCTCTAAGGTG-GTTTTAGAGCTA- |
| | | CCTGAAGGTAAAGATCGGGTCCTC- |
| | | TTTTTTTTcagccaactccaaTTTTTTTT- |
| | | GAGGACCCGATCTTTACCTTCAGG |
| SOX9 | 1393 | g-CAAACTTACACACT-GTTTTAGAGCTA- |
| | | CCTGGTTATAGCGGACGCACTGT- |
| | | TTTTTTTTcagccaactccaaTTTTTTTT- |
| | | ACAGTGCGTCCGCTATAACCAGG |
| SOX9 | 1394 | g-AAAGGGCGGACGGT-GTTTTAGAGCTA- |
| | | CCTGGTTATAGCGGACGCACTGT- |
| | | TTTTTTTTcagccaactccaaTTTTTTTT- |
| | | ACAGTGCGTCCGCTATAACCAGG |
| SOX9 | 1395 | g-ATTGGACCCGATTT-GTTTTAGAGCTA- |
| | | CCTGGTTATAGCGGACGCACTGT- |
| | | TTTTTTTTcagccaactccaaTTTTTTTT- |
| | | ACAGTGCGTCCGCTATAACCAGG |
| SOX9 | 1396 | -GTGGCTCTAAGGTG-GTTTTAGAGCTA- |
| | | CCTGGTTATAGCGGACGCACTGT- |
| | | TTTTTTTTcagccaactccaaTTTTTTTT- |
| | | ACAGTGCGTCCGCTATAACCAGG |
| SOX9 | 1397 | g-CAAACTTACACACT-GTTTTAGAGCTA- |
| | | CCGCATCGTATTATCTGCGAAGC- |
| | | TTTTTTTTcagccaactccaaTTTTTTTT- |
| | | GCTTCGCAGATAATACGATGCGG |
| SOX9 | 1398 | g-AAAGGGCGGACGGT-GTTTTAGAGCTA- |
| | | CCGCATCGTATTATCTGCGAAGC- |
| | | TTTTTTTTcagccaactccaaTTTTTTTT- |
| | | GCTTCGCAGATAATACGATGCGG |
| SOX9 | 1399 | g-ATTGGACCCGATTT-GTTTTAGAGCTA- |
| | | CCGCATCGTATTATCTGCGAAGC- |
| | | TTTTTTTTcagccaactccaaTTTTTTTT- |
| | | GCTTCGCAGATAATACGATGCGG |
| SOX9 | 1400 | -GTGGCTCTAAGGTG-GTTTTAGAGCTA- |
| | | CCGCATCGTATTATCTGCGAAGC- |
| | | TTTTTTTTcagccaactccaaTTTTTTTT- |
| | | GCTTCGCAGATAATACGATGCGG |
| SOX9 | 1401 | g-CAAACTTACACACT-GTTTTAGAGCTA- |
| | | CCGCTAGGACGTTCAACGGAGTC- |
| | | TTTTTTTTcagccaactccaaTTTTTTTT- |
| | | GACTCCGTTGAACGTCCTAGCGG |
| SOX9 | 1402 | g-AAAGGGCGGACGGT-GTTTTAGAGCTA- |
| | | CCGCTAGGACGTTCAACGGAGTC- |
| | | TTTTTTTTcagccaactccaaTTTTTTTT- |
| | | GACTCCGTTGAACGTCCTAGCGG |
| SOX9 | 1403 | g-ATTGGACCCGATTT-GTTTTAGAGCTA- |
| | | CCGCTAGGACGTTCAACGGAGTC- |
| | | TTTTTTTTcagccaactccaaTTTTTTTT- |
| | | GACTCCGTTGAACGTCCTAGCGG |
| SOX9 | 1404 | -GTGGCTCTAAGGTG-GTTTTAGAGCTA- |
| | | CCGCTAGGACGTTCAACGGAGTC- |
| | | TTTTTTTTcagccaactccaaTTTTTTTT- |
| | | GACTCCGTTGAACGTCCTAGCGG |
| SOX9 | 1405 | g-CAAACTTACACACT-GTTTTAGAGCTA- |
| | | CCATAGCGGTACTATCGGCATCT- |
| | | TTTTTTTTcagccaactccaaTTTTTTTT- |
| | | AGATGCCGATAGTACCGCTATGG |
| SOX9 | 1406 | g-AAAGGGCGGACGGT-GTTTTAGAGCTA- |
| | | CCATAGCGGTACTATCGGCATCT- |
| | | TTTTTTTTcagccaactccaaTTTTTTTT- |
| | | AGATGCCGATAGTACCGCTATGG |
| SOX9 | 1407 | g-ATTGGACCCGATTT-GTTTTAGAGCTA- |
| | | CCATAGCGGTACTATCGGCATCT- |
| | | TTTTTTTTcagccaactccaaTTTTTTTT- |
| | | AGATGCCGATAGTACCGCTATGG |
| SOX9 | 1408 | -GTGGCTCTAAGGTG-GTTTTAGAGCTA- |
| | | CCATAGCGGTACTATCGGCATCT- |
| | | TTTTTTTTcagccaactccaaTTTTTTTT- |
| | | AGATGCCGATAGTACCGCTATGG |
| SOX9 | 1409 | g-CAAACTTACACACT-GTTTTAGAGCTA- |
| | | CCTCGTACTAGTCTCGCATGACC- |
| | | TTTTTTTTcagccaactccaaTTTTTTTT- |
| | | GGTCATGCGAGACTAGTACGAGG |
| SOX9 | 1410 | g-AAAGGGCGGACGGT-GTTTTAGAGCTA- |
| | | CCTCGTACTAGTCTCGCATGACC- |
| | | TTTTTTTTcagccaactccaaTTTTTTTT- |
| | | GGTCATGCGAGACTAGTACGAGG |
| SOX9 | 1411 | g-ATTGGACCCGATTT-GTTTTAGAGCTA- |
| | | CCTCGTACTAGTCTCGCATGACC- |
| | | TTTTTTTTcagccaactccaaTTTTTTTT- |
| | | GGTCATGCGAGACTAGTACGAGG |
| SOX9 | 1412 | -GTGGCTCTAAGGTG-GTTTTAGAGCTA- |
| | | CCTCGTACTAGTCTCGCATGACC- |
| | | TTTTTTTTcagccaactccaaTTTTTTTT- |
| | | GGTCATGCGAGACTAGTACGAGG |
| SOX9 | 1413 | g-CAAACTTACACACT-GTTTTAGAGCTA- |
| | | CCGATAGTGCTAAACGACGCTTT- |
| | | TTTTTTTTcagccaactccaaTTTTTTTT- |
| | | AAAGCGTCGTTTAGCACTATCGG |
| SOX9 | 1414 | g-AAAGGGCGGACGGT-GTTTTAGAGCTA- |
| | | CCGATAGTGCTAAACGACGCTTT- |
| | | TTTTTTTTcagccaactccaaTTTTTTTT- |
| | | AAAGCGTCGTTTAGCACTATCGG |
| SOX9 | 1415 | g-ATTGGACCCGATTT-GTTTTAGAGCTA- |
| | | CCGATAGTGCTAAACGACGCTTT- |
| | | TTTTTTTTcagccaactccaaTTTTTTTT- |
| | | AAAGCGTCGTTTAGCACTATCGG |
| SOX9 | 1416 | -GTGGCTCTAAGGTG-GTTTTAGAGCTA- |
| | | CCGATAGTGCTAAACGACGCTTT- |
| | | TTTTTTTTcagccaactccaaTTTTTTTT- |
| | | AAAGCGTCGTTTAGCACTATCGG |
| SOX9 | 1417 | g-CAAACTTACACACT-GTTTTAGAGCTA- |
| | | CCCGTTATCGACGTTCAAGGAAC- |
| | | TTTTTTTTcagccaactccaaTTTTTTTT- |
| | | GTTCCTTGAACGTCGATAACGGG |
| SOX9 | 1418 | g-AAAGGGCGGACGGT-GTTTTAGAGCTA- |
| | | CCCGTTATCGACGTTCAAGGAAC- |
| | | TTTTTTTTcagccaactccaaTTTTTTTT- |
| | | GTTCCTTGAACGTCGATAACGGG |
| SOX9 | 1419 | g-ATTGGACCCGATTT-GTTTTAGAGCTA- |
| | | CCCGTTATCGACGTTCAAGGAAC- |
| | | TTTTTTTTcagccaactccaaTTTTTTTT- |
| | | GTTCCTTGAACGTCGATAACGGG |
| SOX9 | 1420 | -GTGGCTCTAAGGTG-GTTTTAGAGCTA- |
| | | CCCGTTATCGACGTTCAAGGAAC- |
| | | TTTTTTTTcagccaactccaaTTTTTTTT- |
| | | GTTCCTTGAACGTCGATAACGGG |
| SOX9 | 1421 | g-CAAACTTACACACT-GTTTTAGAGCTA- |
| | | CCGATCAATGCGGTCTGCGTAAC- |
| | | TTTTTTTTcagccaactccaaTTTTTTTT- |
| | | GTTACGCAGACCGCATTGATCGG |
| SOX9 | 1422 | g-AAAGGGCGGACGGT-GTTTTAGAGCTA- |
| | | CCGATCAATGCGGTCTGCGTAAC- |
| | | TTTTTTTTcagccaactccaaTTTTTTTT- |
| | | GTTACGCAGACCGCATTGATCGG |
| SOX9 | 1423 | g-ATTGGACCCGATTT-GTTTTAGAGCTA- |
| | | CCGATCAATGCGGTCTGCGTAAC- |
| | | TTTTTTTTcagccaactccaaTTTTTTTT- |
| | | GTTACGCAGACCGCATTGATCGG |
| SOX9 | 1424 | -GTGGCTCTAAGGTG-GTTTTAGAGCTA- |
| | | CCGATCAATGCGGTCTGCGTAAC- |
| | | TTTTTTTTcagccaactccaaTTTTTTTT- |
| | | GTTACGCAGACCGCATTGATCGG |
| SOX9 | 1425 | g-CAAACTTACACACT-GTTTTAGAGCTA- |
| | | CCCTTACTCGCGATACTCTCGAC- |
| | | TTTTTTTTcagccaactccaaTTTTTTTT- |
| | | GTCGAGAGTATCGCGAGTAAGGG |
| SOX9 | 1426 | g-AAAGGGCGGACGGT-GTTTTAGAGCTA- |
| | | CCCTTACTCGCGATACTCTCGAC- |
| | | TTTTTTTTcagccaactccaaTTTTTTTT- |
| | | GTCGAGAGTATCGCGAGTAAGGG |
| SOX9 | 1427 | g-ATTGGACCCGATTT-GTTTTAGAGCTA- |
| | | CCCTTACTCGCGATACTCTCGAC- |
| | | TTTTTTTTcagccaactccaaTTTTTTTT- |
| | | GTCGAGAGTATCGCGAGTAAGGG |
| SOX9 | 1428 | -GTGGCTCTAAGGTG-GTTTTAGAGCTA- |
| | | CCCTTACTCGCGATACTCTCGAC- |
| | | TTTTTTTTcagccaactccaaTTTTTTTT- |
| | | GTCGAGAGTATCGCGAGTAAGGG |
| SOX9 | 1429 | g-CAAACTTACACACT-GTTTTAGAGCTA- |
| | | CCGCGGACGGTAAGCACGGAATA- |
| | | TTTTTTTTcagccaactccaaTTTTTTTT- |
| | | TATTCCGTGCTTACCGTCCGCGG |
| SOX9 | 1430 | g-AAAGGGCGGACGGT-GTTTTAGAGCTA- |
| | | CCGCGGACGGTAAGCACGGAATA- |
| | | TTTTTTTTcagccaactccaaTTTTTTTT- |
| | | TATTCCGTGCTTACCGTCCGCGG |
| SOX9 | 1431 | g-ATTGGACCCGATTT-GTTTTAGAGCTA- |
| | | CCGCGGACGGTAAGCACGGAATA- |
| | | TTTTTTTTcagccaactccaaTTTTTTTT- |
| | | TATTCCGTGCTTACCGTCCGCGG |
| SOX9 | 1432 | -GTGGCTCTAAGGTG-GTTTTAGAGCTA- |
| | | CCGCGGACGGTAAGCACGGAATA- |
| | | TTTTTTTTcagccaactccaaTTTTTTTT- |
| | | TATTCCGTGCTTACCGTCCGCGG |
| SOX9 | 1433 | g-CAAACTTACACACT-GTTTTAGAGCTA- |
| | | CCTATAGTCACGAATCGTAGGGT- |
| | | TTTTTTTTcagccaactccaaTTTTTTTT- |
| | | ACCCTACGATTCGTGACTATAGG |
| SOX9 | 1434 | g-AAAGGGCGGACGGT-GTTTTAGAGCTA- |
| | | CCTATAGTCACGAATCGTAGGGT- |
| | | TTTTTTTTcagccaactccaaTTTTTTTT- |
| | | ACCCTACGATTCGTGACTATAGG |
| SOX9 | 1435 | g-ATTGGACCCGATTT-GTTTTAGAGCTA- |
| | | CCTATAGTCACGAATCGTAGGGT- |
| | | TTTTTTTTcagccaactccaaTTTTTTTT- |
| | | ACCCTACGATTCGTGACTATAGG |
| SOX9 | 1436 | -GTGGCTCTAAGGTG-GTTTTAGAGCTA- |
| | | CCTATAGTCACGAATCGTAGGGT- |
| | | TTTTTTTTcagccaactccaaTTTTTTTT- |
| | | ACCCTACGATTCGTGACTATAGG |
| SOX9 | 1437 | g-CAAACTTACACACT-GTTTTAGAGCTA- |
| | | CCCGTCGTCACGTATGCGTAGCA- |
| | | TTTTTTTTcagccaactccaaTTTTTTTT- |
| | | TGCTACGCATACGTGACGACGGG |
| SOX9 | 1438 | g-AAAGGGCGGACGGT-GTTTTAGAGCTA- |
| | | CCCGTCGTCACGTATGCGTAGCA- |
| | | TTTTTTTTcagccaactccaaTTTTTTTT- |
| | | TGCTACGCATACGTGACGACGGG |
| SOX9 | 1439 | g-ATTGGACCCGATTT-GTTTTAGAGCTA- |
| | | CCCGTCGTCACGTATGCGTAGCA- |
| | | TTTTTTTTcagccaactccaaTTTTTTTT- |
| | | TGCTACGCATACGTGACGACGGG |
| SOX9 | 1440 | -GTGGCTCTAAGGTG-GTTTTAGAGCTA- |
| | | CCCGTCGTCACGTATGCGTAGCA- |
| | | TTTTTTTTcagccaactccaaTTTTTTTT- |
| | | TGCTACGCATACGTGACGACGGG |
| SOX9 | 1441 | g-CAAACTTACACACT-GTTTTAGAGCTA- |
| | | CCCGAGAGGTAGTAGACGACGCA- |
| | | TTTTTTTTcagccaactccaaTTTTTTTT- |
| | | TGCGTCGTCTACTACCTCTCGGG |
| SOX9 | 1442 | g-AAAGGGCGGACGGT-GTTTTAGAGCTA- |
| | | CCCGAGAGGTAGTAGACGACGCA- |
| | | TTTTTTTTcagccaactccaaTTTTTTTT- |
| | | TGCGTCGTCTACTACCTCTCGGG |
| SOX9 | 1443 | g-ATTGGACCCGATTT-GTTTTAGAGCTA- |
| | | CCCGAGAGGTAGTAGACGACGCA- |
| | | TTTTTTTTcagccaactccaaTTTTTTTT- |
| | | TGCGTCGTCTACTACCTCTCGGG |
| SOX9 | 1444 | -GTGGCTCTAAGGTG-GTTTTAGAGCTA- |
| | | CCCGAGAGGTAGTAGACGACGCA- |
| | | TTTTTTTTcagccaactccaaTTTTTTTT- |
| | | TGCGTCGTCTACTACCTCTCGGG |
| SOX9 | 1445 | g-CAAACTTACACACT-GTTTTAGAGCTA- |
| | | CCGACGTCTACGGACGGGAGCTA- |
| | | TTTTTTTTcagccaactccaaTTTTTTTT- |
| | | TAGCTCCCGTCCGTAGACGTCGG |
| SOX9 | 1446 | g-AAAGGGCGGACGGT-GTTTTAGAGCTA- |
| | | CCGACGTCTACGGACGGGAGCTA- |
| | | TTTTTTTTcagccaactccaaTTTTTTTT- |
| | | TAGCTCCCGTCCGTAGACGTCGG |
| SOX9 | 1447 | g-ATTGGACCCGATTT-GTTTTAGAGCTA- |
| | | CCGACGTCTACGGACGGGAGCTA- |
| | | TTTTTTTTcagccaactccaaTTTTTTTT- |
| | | TAGCTCCCGTCCGTAGACGTCGG |
| SOX9 | 1448 | -GTGGCTCTAAGGTG-GTTTTAGAGCTA- |
| | | CCGACGTCTACGGACGGGAGCTA- |
| | | TTTTTTTTcagccaactccaaTTTTTTTT- |
| | | TAGCTCCCGTCCGTAGACGTCGG |
| SOX9 | 1449 | g-CAAACTTACACACT-GTTTTAGAGCTA- |
| | | CCAAAGCTCATTCGCGACTGAGC- |
| | | TTTTTTTTcagccaactccaaTTTTTTTT- |
| | | GCTCAGTCGCGAATGAGCTTTGG |
| SOX9 | 1450 | g-AAAGGGCGGACGGT-GTTTTAGAGCTA- |
| | | CCAAAGCTCATTCGCGACTGAGC- |
| | | TTTTTTTTcagccaactccaaTTTTTTTT- |
| | | GCTCAGTCGCGAATGAGCTTTGG |
| SOX9 | 1451 | g-ATTGGACCCGATTT-GTTTTAGAGCTA- |
| | | CCAAAGCTCATTCGCGACTGAGC- |
| | | TTTTTTTTcagccaactccaaTTTTTTTT- |
| | | GCTCAGTCGCGAATGAGCTTTGG |
| SOX9 | 1452 | -GTGGCTCTAAGGTG-GTTTTAGAGCTA- |
| | | CCAAAGCTCATTCGCGACTGAGC- |
| | | TTTTTTTTcagccaactccaaTTTTTTTT- |
| | | GCTCAGTCGCGAATGAGCTTTGG |
| SOX9 | 1453 | g-CAAACTTACACACT-GTTTTAGAGCTA- |
| | | CCATGGCACGATCGACACGGAGG- |
| | | TTTTTTTTcagccaactccaaTTTTTTTT- |
| | | CCTCCGTGTCGATCGTGCCATGG |
| SOX9 | 1454 | g-AAAGGGCGGACGGT-GTTTTAGAGCTA- |
| | | CCATGGCACGATCGACACGGAGG- |
| | | TTTTTTTTcagccaactccaaTTTTTTTT- |
| | | CCTCCGTGTCGATCGTGCCATGG |
| SOX9 | 1455 | g-ATTGGACCCGATTT-GTTTTAGAGCTA- |
| | | CCATGGCACGATCGACACGGAGG- |
| | | TTTTTTTTcagccaactccaaTTTTTTTT- |
| | | CCTCCGTGTCGATCGTGCCATGG |
| SOX9 | 1456 | -GTGGCTCTAAGGTG-GTTTTAGAGCTA- |
| | | CCATGGCACGATCGACACGGAGG- |
| | | TTTTTTTTcagccaactccaaTTTTTTTT- |
| | | CCTCCGTGTCGATCGTGCCATGG |
| SOX9 | 1457 | g-CAAACTTACACACT-GTTTTAGAGCTA- |
| | | CCCGAACTCTCTATCGAACGAGT- |
| | | TTTTTTTTcagccaactccaaTTTTTTTT- |
| | | ACTCGTTCGATAGAGAGTTCGGG |
| SOX9 | 1458 | g-AAAGGGCGGACGGT-GTTTTAGAGCTA- |
| | | CCCGAACTCTCTATCGAACGAGT- |
| | | TTTTTTTTcagccaactccaaTTTTTTTT- |
| | | ACTCGTTCGATAGAGAGTTCGGG |
| SOX9 | 1459 | g-ATTGGACCCGATTT-GTTTTAGAGCTA- |
| | | CCCGAACTCTCTATCGAACGAGT- |
| | | TTTTTTTTcagccaactccaaTTTTTTTT- |
| | | ACTCGTTCGATAGAGAGTTCGGG |
| SOX9 | 1460 | -GTGGCTCTAAGGTG-GTTTTAGAGCTA- |
| | | CCCGAACTCTCTATCGAACGAGT- |
| | | TTTTTTTTcagccaactccaaTTTTTTTT- |
| | | ACTCGTTCGATAGAGAGTTCGGG |
| SOX9 | 1461 | g-CAAACTTACACACT-GTTTTAGAGCTA- |
| | | CCTACACGATAGTGGTCGTGCGC- |
| | | TTTTTTTTcagccaactccaaTTTTTTTT- |
| | | GCGCACGACCACTATCGTGTAGG |
| SOX9 | 1462 | g-AAAGGGCGGACGGT-GTTTTAGAGCTA- |
| | | CCTACACGATAGTGGTCGTGCGC- |
| | | TTTTTTTTcagccaactccaaTTTTTTTT- |
| | | GCGCACGACCACTATCGTGTAGG |
| SOX9 | 1463 | g-ATTGGACCCGATTT-GTTTTAGAGCTA- |
| | | CCTACACGATAGTGGTCGTGCGC- |
| | | TTTTTTTTcagccaactccaaTTTTTTTT- |
| | | GCGCACGACCACTATCGTGTAGG |
| SOX9 | 1464 | -GTGGCTCTAAGGTG-GTTTTAGAGCTA- |
| | | CCTACACGATAGTGGTCGTGCGC- |
| | | TTTTTTTTcagccaactccaaTTTTTTTT- |
| | | GCGCACGACCACTATCGTGTAGG |
| SOX9 | 1465 | g-CAAACTTACACACT-GTTTTAGAGCTA- |
| | | CCCTGGCGGAACGTTCGAGTAAT- |
| | | TTTTTTTTcagccaactccaaTTTTTTTT- |
| | | ATTACTCGAACGTTCCGCCAGGG |
| SOX9 | 1466 | g-AAAGGGCGGACGGT-GTTTTAGAGCTA- |
| | | CCCTGGCGGAACGTTCGAGTAAT- |
| | | TTTTTTTTcagccaactccaaTTTTTTTT- |
| | | ATTACTCGAACGTTCCGCCAGGG |
| SOX9 | 1467 | g-ATTGGACCCGATTT-GTTTTAGAGCTA- |
| | | CCCTGGCGGAACGTTCGAGTAAT- |
| | | TTTTTTTTcagccaactccaaTTTTTTTT- |
| | | ATTACTCGAACGTTCCGCCAGGG |
| SOX9 | 1468 | -GTGGCTCTAAGGTG-GTTTTAGAGCTA- |
| | | CCCTGGCGGAACGTTCGAGTAAT- |
| | | TTTTTTTTcagccaactccaaTTTTTTTT- |
| | | ATTACTCGAACGTTCCGCCAGGG |
| SOX9 | 1469 | g-CAAACTTACACACT-GTTTTAGAGCTA- |
| | | CCTACACTCGACATCGGTAGCTA- |
| | | TTTTTTTTcagccaactccaaTTTTTTTT- |
| | | TAGCTACCGATGTCGAGTGTAGG |
| SOX9 | 1470 | g-AAAGGGCGGACGGT-GTTTTAGAGCTA- |
| | | CCTACACTCGACATCGGTAGCTA- |
| | | TTTTTTTTcagccaactccaaTTTTTTTT- |
| | | TAGCTACCGATGTCGAGTGTAGG |
| SOX9 | 1471 | g-ATTGGACCCGATTT-GTTTTAGAGCTA- |
| | | CCTACACTCGACATCGGTAGCTA- |
| | | TTTTTTTTcagccaactccaaTTTTTTTT- |
| | | TAGCTACCGATGTCGAGTGTAGG |
| SOX9 | 1472 | -GTGGCTCTAAGGTG-GTTTTAGAGCTA- |
| | | CCTACACTCGACATCGGTAGCTA- |
| | | TTTTTTTTcagccaactccaaTTTTTTTT- |
| | | TAGCTACCGATGTCGAGTGTAGG |
| SP1 | 1473 | g-TGAGACGTAGGGAT-GTTTTAGAGCTA- |
| | | CCGTCGTTGTACCGTCTACTTGAC- |
| | | TTTTTTTTcagccaactccaaTTTTTTTT- |
| | | GTCAAGTAGACGGTACAACGACGG |
| SP1 | 1474 | -GCGAGTCTTGCCAT-GTTTTAGAGCTA- |
| | | CCGTCGTTGTACCGTCTACTTGAC- |
| | | TTTTTTTTcagccaactccaaTTTTTTTT- |
| | | GTCAAGTAGACGGTACAACGACGG |
| SP1 | 1475 | -GGACCGGACAGGGA-GTTTTAGAGCTA- |
| | | CCGTCGTTGTACCGTCTACTTGAC- |
| | | TTTTTTTTcagccaactccaaTTTTTTTT- |
| | | GTCAAGTAGACGGTACAACGACGG |
| SP1 | 1476 | g-CCGCCCAATGAGGG-GTTTTAGAGCTA- |
| | | CCGTCGTTGTACCGTCTACTTGAC- |
| | | TTTTTTTTcagccaactccaaTTTTTTTT- |
| | | GTCAAGTAGACGGTACAACGACGG |
| SP1 | 1477 | g-TGAGACGTAGGGAT-GTTTTAGAGCTA- |
| | | CCTTCCCGACTTCCGTAGGAGCGC- |
| | | TTTTTTTTcagccaactccaaTTTTTTTT- |
| | | GCGCTCCTACGGAAGTCGGGAAGG |
| SP1 | 1478 | -GCGAGTCTTGCCAT-GTTTTAGAGCTA- |
| | | CCTTCCCGACTTCCGTAGGAGCGC- |
| | | TTTTTTTTcagccaactccaaTTTTTTTT- |
| | | GCGCTCCTACGGAAGTCGGGAAGG |
| SP1 | 1479 | -GGACCGGACAGGGA-GTTTTAGAGCTA- |
| | | CCTTCCCGACTTCCGTAGGAGCGC- |
| | | TTTTTTTTcagccaactccaaTTTTTTTT- |
| | | GCGCTCCTACGGAAGTCGGGAAGG |
| SP1 | 1480 | g-CCGCCCAATGAGGG-GTTTTAGAGCTA- |
| | | CCTTCCCGACTTCCGTAGGAGCGC- |
| | | TTTTTTTTcagccaactccaaTTTTTTTT- |
| | | GCGCTCCTACGGAAGTCGGGAAGG |
| SP1 | 1481 | g-TGAGACGTAGGGAT-GTTTTAGAGCTA- |
| | | CCTGAAGGTAAAGATCGGGTCCTC- |
| | | TTTTTTTTcagccaactccaaTTTTTTTT- |
| | | GAGGACCCGATCTTTACCTTCAGG |
| SP1 | 1482 | -GCGAGTCTTGCCAT-GTTTTAGAGCTA- |
| | | CCTGAAGGTAAAGATCGGGTCCTC- |
| | | TTTTTTTTcagccaactccaaTTTTTTTT- |
| | | GAGGACCCGATCTTTACCTTCAGG |
| SP1 | 1483 | -GGACCGGACAGGGA-GTTTTAGAGCTA- |
| | | CCTGAAGGTAAAGATCGGGTCCTC- |
| | | TTTTTTTTcagccaactccaaTTTTTTTT- |
| | | GAGGACCCGATCTTTACCTTCAGG |
| SP1 | 1484 | g-CCGCCCAATGAGGG-GTTTTAGAGCTA- |
| | | CCTGAAGGTAAAGATCGGGTCCTC- |
| | | TTTTTTTTcagccaactccaaTTTTTTTT- |
| | | GAGGACCCGATCTTTACCTTCAGG |
| SP1 | 1485 | g-TGAGACGTAGGGAT-GTTTTAGAGCTA- |
| | | CCTGGTTATAGCGGACGCACTGT- |
| | | TTTTTTTTcagccaactccaaTTTTTTTT- |
| | | ACAGTGCGTCCGCTATAACCAGG |
| SP1 | 1486 | -GCGAGTCTTGCCAT-GTTTTAGAGCTA- |
| | | CCTGGTTATAGCGGACGCACTGT- |
| | | TTTTTTTTcagccaactccaaTTTTTTTT- |
| | | ACAGTGCGTCCGCTATAACCAGG |
| SP1 | 1487 | -GGACCGGACAGGGA-GTTTTAGAGCTA- |
| | | CCTGGTTATAGCGGACGCACTGT- |
| | | TTTTTTTTcagccaactccaaTTTTTTTT- |
| | | ACAGTGCGTCCGCTATAACCAGG |
| SP1 | 1488 | g-CCGCCCAATGAGGG-GTTTTAGAGCTA- |
| | | CCTGGTTATAGCGGACGCACTGT- |
| | | TTTTTTTTcagccaactccaaTTTTTTTT- |
| | | ACAGTGCGTCCGCTATAACCAGG |
| SP1 | 1489 | g-TGAGACGTAGGGAT-GTTTTAGAGCTA- |
| | | CCGCATCGTATTATCTGCGAAGC- |
| | | TTTTTTTTcagccaactccaaTTTTTTTT- |
| | | GCTTCGCAGATAATACGATGCGG |
| SP1 | 1490 | -GCGAGTCTTGCCAT-GTTTTAGAGCTA- |
| | | CCGCATCGTATTATCTGCGAAGC- |
| | | TTTTTTTTcagccaactccaaTTTTTTTT- |
| | | GCTTCGCAGATAATACGATGCGG |
| SP1 | 1491 | -GGACCGGACAGGGA-GTTTTAGAGCTA- |
| | | CCGCATCGTATTATCTGCGAAGC- |
| | | TTTTTTTTcagccaactccaaTTTTTTTT- |
| | | GCTTCGCAGATAATACGATGCGG |
| SP1 | 1492 | g-CCGCCCAATGAGGG-GTTTTAGAGCTA- |
| | | CCGCATCGTATTATCTGCGAAGC- |
| | | TTTTTTTTcagccaactccaaTTTTTTTT- |
| | | GCTTCGCAGATAATACGATGCGG |
| SP1 | 1493 | g-TGAGACGTAGGGAT-GTTTTAGAGCTA- |
| | | CCGCTAGGACGTTCAACGGAGTC- |
| | | TTTTTTTTcagccaactccaaTTTTTTTT- |
| | | GACTCCGTTGAACGTCCTAGCGG |
| SP1 | 1494 | -GCGAGTCTTGCCAT-GTTTTAGAGCTA- |
| | | CCGCTAGGACGTTCAACGGAGTC- |
| | | TTTTTTTTcagccaactccaaTTTTTTTT- |
| | | GACTCCGTTGAACGTCCTAGCGG |
| SP1 | 1495 | -GGACCGGACAGGGA-GTTTTAGAGCTA- |
| | | CCGCTAGGACGTTCAACGGAGTC- |
| | | TTTTTTTTcagccaactccaaTTTTTTTT- |
| | | GACTCCGTTGAACGTCCTAGCGG |
| SP1 | 1496 | g-CCGCCCAATGAGGG-GTTTTAGAGCTA- |
| | | CCGCTAGGACGTTCAACGGAGTC- |
| | | TTTTTTTTcagccaactccaaTTTTTTTT- |
| | | GACTCCGTTGAACGTCCTAGCGG |
| SP1 | 1497 | g-TGAGACGTAGGGAT-GTTTTAGAGCTA- |
| | | CCATAGCGGTACTATCGGCATCT- |
| | | TTTTTTTTcagccaactccaaTTTTTTTT- |
| | | AGATGCCGATAGTACCGCTATGG |
| SP1 | 1498 | -GCGAGTCTTGCCAT-GTTTTAGAGCTA- |
| | | CCATAGCGGTACTATCGGCATCT- |
| | | TTTTTTTTcagccaactccaaTTTTTTTT- |
| | | AGATGCCGATAGTACCGCTATGG |
| SP1 | 1499 | -GGACCGGACAGGGA-GTTTTAGAGCTA- |
| | | CCATAGCGGTACTATCGGCATCT- |
| | | TTTTTTTTcagccaactccaaTTTTTTTT- |
| | | AGATGCCGATAGTACCGCTATGG |
| SP1 | 1500 | g-CCGCCCAATGAGGG-GTTTTAGAGCTA- |
| | | CCATAGCGGTACTATCGGCATCT- |
| | | TTTTTTTTcagccaactccaaTTTTTTTT- |
| | | AGATGCCGATAGTACCGCTATGG |
| SP1 | 1501 | g-TGAGACGTAGGGAT-GTTTTAGAGCTA- |
| | | CCTCGTACTAGTCTCGCATGACC- |
| | | TTTTTTTTcagccaactccaaTTTTTTTT- |
| | | GGTCATGCGAGACTAGTACGAGG |
| SP1 | 1502 | -GCGAGTCTTGCCAT-GTTTTAGAGCTA- |
| | | CCTCGTACTAGTCTCGCATGACC- |
| | | TTTTTTTTcagccaactccaaTTTTTTTT- |
| | | GGTCATGCGAGACTAGTACGAGG |
| SP1 | 1503 | -GGACCGGACAGGGA-GTTTTAGAGCTA- |
| | | CCTCGTACTAGTCTCGCATGACC- |
| | | TTTTTTTTcagccaactccaaTTTTTTTT- |
| | | GGTCATGCGAGACTAGTACGAGG |
| SP1 | 1504 | g-CCGCCCAATGAGGG-GTTTTAGAGCTA- |
| | | CCTCGTACTAGTCTCGCATGACC- |
| | | TTTTTTTTcagccaactccaaTTTTTTTT- |
| | | GGTCATGCGAGACTAGTACGAGG |
| SP1 | 1505 | g-TGAGACGTAGGGAT-GTTTTAGAGCTA- |
| | | CCGATAGTGCTAAACGACGCTTT- |
| | | TTTTTTTTcagccaactccaaTTTTTTTT- |
| | | AAAGCGTCGTTTAGCACTATCGG |
| SP1 | 1506 | -GCGAGTCTTGCCAT-GTTTTAGAGCTA- |
| | | CCGATAGTGCTAAACGACGCTTT- |
| | | TTTTTTTTcagccaactccaaTTTTTTTT- |
| | | AAAGCGTCGTTTAGCACTATCGG |
| SP1 | 1507 | -GGACCGGACAGGGA-GTTTTAGAGCTA- |
| | | CCGATAGTGCTAAACGACGCTTT- |
| | | TTTTTTTTcagccaactccaaTTTTTTTT- |
| | | AAAGCGTCGTTTAGCACTATCGG |
| SP1 | 1508 | g-CCGCCCAATGAGGG-GTTTTAGAGCTA- |
| | | CCGATAGTGCTAAACGACGCTTT- |
| | | TTTTTTTTcagccaactccaaTTTTTTTT- |
| | | AAAGCGTCGTTTAGCACTATCGG |
| SP1 | 1509 | g-TGAGACGTAGGGAT-GTTTTAGAGCTA- |
| | | CCCGTTATCGACGTTCAAGGAAC- |
| | | TTTTTTTTcagccaactccaaTTTTTTTT- |
| | | GTTCCTTGAACGTCGATAACGGG |
| SP1 | 1510 | -GCGAGTCTTGCCAT-GTTTTAGAGCTA- |
| | | CCCGTTATCGACGTTCAAGGAAC- |
| | | TTTTTTTTcagccaactccaaTTTTTTTT- |
| | | GTTCCTTGAACGTCGATAACGGG |
| SP1 | 1511 | -GGACCGGACAGGGA-GTTTTAGAGCTA- |
| | | CCCGTTATCGACGTTCAAGGAAC- |
| | | TTTTTTTTcagccaactccaaTTTTTTTT- |
| | | GTTCCTTGAACGTCGATAACGGG |
| SP1 | 1512 | g-CCGCCCAATGAGGG-GTTTTAGAGCTA- |
| | | CCCGTTATCGACGTTCAAGGAAC- |
| | | TTTTTTTTcagccaactccaaTTTTTTTT- |
| | | GTTCCTTGAACGTCGATAACGGG |
| SP1 | 1513 | g-TGAGACGTAGGGAT-GTTTTAGAGCTA- |
| | | CCGATCAATGCGGTCTGCGTAAC- |
| | | TTTTTTTTcagccaactccaaTTTTTTTT- |
| | | GTTACGCAGACCGCATTGATCGG |
| SP1 | 1514 | -GCGAGTCTTGCCAT-GTTTTAGAGCTA- |
| | | CCGATCAATGCGGTCTGCGTAAC- |
| | | TTTTTTTTcagccaactccaaTTTTTTTT- |
| | | GTTACGCAGACCGCATTGATCGG |
| SP1 | 1515 | -GGACCGGACAGGGA-GTTTTAGAGCTA- |
| | | CCGATCAATGCGGTCTGCGTAAC- |
| | | TTTTTTTTcagccaactccaaTTTTTTTT- |
| | | GTTACGCAGACCGCATTGATCGG |
| SP1 | 1516 | g-CCGCCCAATGAGGG-GTTTTAGAGCTA- |
| | | CCGATCAATGCGGTCTGCGTAAC- |
| | | TTTTTTTTcagccaactccaaTTTTTTTT- |
| | | GTTACGCAGACCGCATTGATCGG |
| SP1 | 1517 | g-TGAGACGTAGGGAT-GTTTTAGAGCTA- |
| | | CCCTTACTCGCGATACTCTCGAC- |
| | | TTTTTTTTcagccaactccaaTTTTTTTT- |
| | | GTCGAGAGTATCGCGAGTAAGGG |
| SP1 | 1518 | -GCGAGTCTTGCCAT-GTTTTAGAGCTA- |
| | | CCCTTACTCGCGATACTCTCGAC- |
| | | TTTTTTTTcagccaactccaaTTTTTTTT- |
| | | GTCGAGAGTATCGCGAGTAAGGG |
| SP1 | 1519 | -GGACCGGACAGGGA-GTTTTAGAGCTA- |
| | | CCCTTACTCGCGATACTCTCGAC- |
| | | TTTTTTTTcagccaactccaaTTTTTTTT- |
| | | GTCGAGAGTATCGCGAGTAAGGG |
| SP1 | 1520 | g-CCGCCCAATGAGGG-GTTTTAGAGCTA- |
| | | CCCTTACTCGCGATACTCTCGAC- |
| | | TTTTTTTTcagccaactccaaTTTTTTTT- |
| | | GTCGAGAGTATCGCGAGTAAGGG |
| SP1 | 1521 | g-TGAGACGTAGGGAT-GTTTTAGAGCTA- |
| | | CCGCGGACGGTAAGCACGGAATA- |
| | | TTTTTTTTcagccaactccaaTTTTTTTT- |
| | | TATTCCGTGCTTACCGTCCGCGG |
| SP1 | 1522 | -GCGAGTCTTGCCAT-GTTTTAGAGCTA- |
| | | CCGCGGACGGTAAGCACGGAATA- |
| | | TTTTTTTTcagccaactccaaTTTTTTTT- |
| | | TATTCCGTGCTTACCGTCCGCGG |
| SP1 | 1523 | -GGACCGGACAGGGA-GTTTTAGAGCTA- |
| | | CCGCGGACGGTAAGCACGGAATA- |
| | | TTTTTTTTcagccaactccaaTTTTTTTT- |
| | | TATTCCGTGCTTACCGTCCGCGG |
| SP1 | 1524 | g-CCGCCCAATGAGGG-GTTTTAGAGCTA- |
| | | CCGCGGACGGTAAGCACGGAATA- |
| | | TTTTTTTTcagccaactccaaTTTTTTTT- |
| | | TATTCCGTGCTTACCGTCCGCGG |
| SP1 | 1525 | g-TGAGACGTAGGGAT-GTTTTAGAGCTA- |
| | | CCTATAGTCACGAATCGTAGGGT- |
| | | TTTTTTTTcagccaactccaaTTTTTTTT- |
| | | ACCCTACGATTCGTGACTATAGG |
| SP1 | 1526 | -GCGAGTCTTGCCAT-GTTTTAGAGCTA- |
| | | CCTATAGTCACGAATCGTAGGGT- |
| | | TTTTTTTTcagccaactccaaTTTTTTTT- |
| | | ACCCTACGATTCGTGACTATAGG |
| SP1 | 1527 | -GGACCGGACAGGGA-GTTTTAGAGCTA- |
| | | CCTATAGTCACGAATCGTAGGGT- |
| | | TTTTTTTTcagccaactccaaTTTTTTTT- |
| | | ACCCTACGATTCGTGACTATAGG |
| SP1 | 1528 | g-CCGCCCAATGAGGG-GTTTTAGAGCTA- |
| | | CCTATAGTCACGAATCGTAGGGT- |
| | | TTTTTTTTcagccaactccaaTTTTTTTT- |
| | | ACCCTACGATTCGTGACTATAGG |
| SP1 | 1529 | g-TGAGACGTAGGGAT-GTTTTAGAGCTA- |
| | | CCCGTCGTCACGTATGCGTAGCA- |
| | | TTTTTTTTcagccaactccaaTTTTTTTT- |
| | | TGCTACGCATACGTGACGACGGG |
| SP1 | 1530 | -GCGAGTCTTGCCAT-GTTTTAGAGCTA- |
| | | CCCGTCGTCACGTATGCGTAGCA- |
| | | TTTTTTTTcagccaactccaaTTTTTTTT- |
| | | TGCTACGCATACGTGACGACGGG |
| SP1 | 1531 | -GGACCGGACAGGGA-GTTTTAGAGCTA- |
| | | CCCGTCGTCACGTATGCGTAGCA- |
| | | TTTTTTTTcagccaactccaaTTTTTTTT- |
| | | TGCTACGCATACGTGACGACGGG |
| SP1 | 1532 | g-CCGCCCAATGAGGG-GTTTTAGAGCTA- |
| | | CCCGTCGTCACGTATGCGTAGCA- |
| | | TTTTTTTTcagccaactccaaTTTTTTTT- |
| | | TGCTACGCATACGTGACGACGGG |
| SP1 | 1533 | g-TGAGACGTAGGGAT-GTTTTAGAGCTA- |
| | | CCCGAGAGGTAGTAGACGACGCA- |
| | | TTTTTTTTcagccaactccaaTTTTTTTT- |
| | | TGCGTCGTCTACTACCTCTCGGG |
| SP1 | 1534 | -GCGAGTCTTGCCAT-GTTTTAGAGCTA- |
| | | CCCGAGAGGTAGTAGACGACGCA- |
| | | TTTTTTTTcagccaactccaaTTTTTTTT- |
| | | TGCGTCGTCTACTACCTCTCGGG |
| SP1 | 1535 | -GGACCGGACAGGGA-GTTTTAGAGCTA- |
| | | CCCGAGAGGTAGTAGACGACGCA- |
| | | TTTTTTTTcagccaactccaaTTTTTTTT- |
| | | TGCGTCGTCTACTACCTCTCGGG |
| SP1 | 1536 | g-CCGCCCAATGAGGG-GTTTTAGAGCTA- |
| | | CCCGAGAGGTAGTAGACGACGCA- |
| | | TTTTTTTTcagccaactccaaTTTTTTTT- |
| | | TGCGTCGTCTACTACCTCTCGGG |
| SP1 | 1537 | g-TGAGACGTAGGGAT-GTTTTAGAGCTA- |
| | | CCGACGTCTACGGACGGGAGCTA- |
| | | TTTTTTTTcagccaactccaaTTTTTTTT- |
| | | TAGCTCCCGTCCGTAGACGTCGG |
| SP1 | 1538 | -GCGAGTCTTGCCAT-GTTTTAGAGCTA- |
| | | CCGACGTCTACGGACGGGAGCTA- |
| | | TTTTTTTTcagccaactccaaTTTTTTTT- |
| | | TAGCTCCCGTCCGTAGACGTCGG |
| SP1 | 1539 | -GGACCGGACAGGGA-GTTTTAGAGCTA- |
| | | CCGACGTCTACGGACGGGAGCTA- |
| | | TTTTTTTTcagccaactccaaTTTTTTTT- |
| | | TAGCTCCCGTCCGTAGACGTCGG |
| SP1 | 1540 | g-CCGCCCAATGAGGG-GTTTTAGAGCTA- |
| | | CCGACGTCTACGGACGGGAGCTA- |
| | | TTTTTTTTcagccaactccaaTTTTTTTT- |
| | | TAGCTCCCGTCCGTAGACGTCGG |
| SP1 | 1541 | g-TGAGACGTAGGGAT-GTTTTAGAGCTA- |
| | | CCAAAGCTCATTCGCGACTGAGC- |
| | | TTTTTTTTcagccaactccaaTTTTTTTT- |
| | | GCTCAGTCGCGAATGAGCTTTGG |
| SP1 | 1542 | -GCGAGTCTTGCCAT-GTTTTAGAGCTA- |
| | | CCAAAGCTCATTCGCGACTGAGC- |
| | | TTTTTTTTcagccaactccaaTTTTTTTT- |
| | | GCTCAGTCGCGAATGAGCTTTGG |
| SP1 | 1543 | -GGACCGGACAGGGA-GTTTTAGAGCTA- |
| | | CCAAAGCTCATTCGCGACTGAGC- |
| | | TTTTTTTTcagccaactccaaTTTTTTTT- |
| | | GCTCAGTCGCGAATGAGCTTTGG |
| SP1 | 1544 | g-CCGCCCAATGAGGG-GTTTTAGAGCTA- |
| | | CCAAAGCTCATTCGCGACTGAGC- |
| | | TTTTTTTTcagccaactccaaTTTTTTTT- |
| | | GCTCAGTCGCGAATGAGCTTTGG |
| SP1 | 1545 | g-TGAGACGTAGGGAT-GTTTTAGAGCTA- |
| | | CCATGGCACGATCGACACGGAGG- |
| | | TTTTTTTTcagccaactccaaTTTTTTTT- |
| | | CCTCCGTGTCGATCGTGCCATGG |
| SP1 | 1546 | -GCGAGTCTTGCCAT-GTTTTAGAGCTA- |
| | | CCATGGCACGATCGACACGGAGG- |
| | | TTTTTTTTcagccaactccaaTTTTTTTT- |
| | | CCTCCGTGTCGATCGTGCCATGG |
| SP1 | 1547 | -GGACCGGACAGGGA-GTTTTAGAGCTA- |
| | | CCATGGCACGATCGACACGGAGG- |
| | | TTTTTTTTcagccaactccaaTTTTTTTT- |
| | | CCTCCGTGTCGATCGTGCCATGG |
| SP1 | 1548 | g-CCGCCCAATGAGGG-GTTTTAGAGCTA- |
| | | CCATGGCACGATCGACACGGAGG- |
| | | TTTTTTTTcagccaactccaaTTTTTTTT- |
| | | CCTCCGTGTCGATCGTGCCATGG |
| SP1 | 1549 | g-TGAGACGTAGGGAT-GTTTTAGAGCTA- |
| | | CCCGAACTCTCTATCGAACGAGT- |
| | | TTTTTTTTcagccaactccaaTTTTTTTT- |
| | | ACTCGTTCGATAGAGAGTTCGGG |
| SP1 | 1550 | -GCGAGTCTTGCCAT-GTTTTAGAGCTA- |
| | | CCCGAACTCTCTATCGAACGAGT- |
| | | TTTTTTTTcagccaactccaaTTTTTTTT- |
| | | ACTCGTTCGATAGAGAGTTCGGG |
| SP1 | 1551 | -GGACCGGACAGGGA-GTTTTAGAGCTA- |
| | | CCCGAACTCTCTATCGAACGAGT- |
| | | TTTTTTTTcagccaactccaaTTTTTTTT- |
| | | ACTCGTTCGATAGAGAGTTCGGG |
| SP1 | 1552 | g-CCGCCCAATGAGGG-GTTTTAGAGCTA- |
| | | CCCGAACTCTCTATCGAACGAGT- |
| | | TTTTTTTTcagccaactccaaTTTTTTTT- |
| | | ACTCGTTCGATAGAGAGTTCGGG |
| SP1 | 1553 | g-TGAGACGTAGGGAT-GTTTTAGAGCTA- |
| | | CCTACACGATAGTGGTCGTGCGC- |
| | | TTTTTTTTcagccaactccaaTTTTTTTT- |
| | | GCGCACGACCACTATCGTGTAGG |
| SP1 | 1554 | -GCGAGTCTTGCCAT-GTTTTAGAGCTA- |
| | | CCTACACGATAGTGGTCGTGCGC- |
| | | TTTTTTTTcagccaactccaaTTTTTTTT- |
| | | GCGCACGACCACTATCGTGTAGG |
| SP1 | 1555 | -GGACCGGACAGGGA-GTTTTAGAGCTA- |
| | | CCTACACGATAGTGGTCGTGCGC- |
| | | TTTTTTTTcagccaactccaaTTTTTTTT- |
| | | GCGCACGACCACTATCGTGTAGG |
| SP1 | 1556 | g-CCGCCCAATGAGGG-GTTTTAGAGCTA- |
| | | CCTACACGATAGTGGTCGTGCGC- |
| | | TTTTTTTTcagccaactccaaTTTTTTTT- |
| | | GCGCACGACCACTATCGTGTAGG |
| SP1 | 1557 | g-TGAGACGTAGGGAT-GTTTTAGAGCTA- |
| | | CCCTGGCGGAACGTTCGAGTAAT- |
| | | TTTTTTTTcagccaactccaaTTTTTTTT- |
| | | ATTACTCGAACGTTCCGCCAGGG |
| SP1 | 1558 | -GCGAGTCTTGCCAT-GTTTTAGAGCTA- |
| | | CCCTGGCGGAACGTTCGAGTAAT- |
| | | TTTTTTTTcagccaactccaaTTTTTTTT- |
| | | ATTACTCGAACGTTCCGCCAGGG |
| SP1 | 1559 | -GGACCGGACAGGGA-GTTTTAGAGCTA- |
| | | CCCTGGCGGAACGTTCGAGTAAT- |
| | | TTTTTTTTcagccaactccaaTTTTTTTT- |
| | | ATTACTCGAACGTTCCGCCAGGG |
| SP1 | 1560 | g-CCGCCCAATGAGGG-GTTTTAGAGCTA- |
| | | CCCTGGCGGAACGTTCGAGTAAT- |
| | | TTTTTTTTcagccaactccaaTTTTTTTT- |
| | | ATTACTCGAACGTTCCGCCAGGG |
| SP1 | 1561 | g-TGAGACGTAGGGAT-GTTTTAGAGCTA- |
| | | CCTACACTCGACATCGGTAGCTA- |
| | | TTTTTTTTcagccaactccaaTTTTTTTT- |
| | | TAGCTACCGATGTCGAGTGTAGG |
| SP1 | 1562 | -GCGAGTCTTGCCAT-GTTTTAGAGCTA- |
| | | CCTACACTCGACATCGGTAGCTA- |
| | | TTTTTTTTcagccaactccaaTTTTTTTT- |
| | | TAGCTACCGATGTCGAGTGTAGG |
| SP1 | 1563 | -GGACCGGACAGGGA-GTTTTAGAGCTA- |
| | | CCTACACTCGACATCGGTAGCTA- |
| | | TTTTTTTTcagccaactccaaTTTTTTTT- |
| | | TAGCTACCGATGTCGAGTGTAGG |
| SP1 | 1564 | g-CCGCCCAATGAGGG-GTTTTAGAGCTA- |
| | | CCTACACTCGACATCGGTAGCTA- |
| | | TTTTTTTTcagccaactccaaTTTTTTTT- |
| | | TAGCTACCGATGTCGAGTGTAGG |
| TCF15 | 1565 | g-AAAAGTTCGGATCT-GTTTTAGAGCTA- |
| | | CCGTCGTTGTACCGTCTACTTGAC- |
| | | TTTTTTTTcagccaactccaaTTTTTTTT- |
| | | GTCAAGTAGACGGTACAACGACGG |
| TCF15 | 1566 | -GTCGCCATTGGCCA-GTTTTAGAGCTA- |
| | | CCGTCGTTGTACCGTCTACTTGAC- |
| | | TTTTTTTTcagccaactccaaTTTTTTTT- |
| | | GTCAAGTAGACGGTACAACGACGG |
| TCF15 | 1567 | g-CTCCCTCGCCTATA-GTTTTAGAGCTA- |
| | | CCGTCGTTGTACCGTCTACTTGAC- |
| | | TTTTTTTTcagccaactccaaTTTTTTTT- |
| | | GTCAAGTAGACGGTACAACGACGG |
| TCF15 | 1568 | -GGCCCGGGAGCCGG-GTTTTAGAGCTA- |
| | | CCGTCGTTGTACCGTCTACTTGAC- |
| | | TTTTTTTTcagccaactccaaTTTTTTTT- |
| | | GTCAAGTAGACGGTACAACGACGG |
| TCF15 | 1569 | g-AAAAGTTCGGATCT-GTTTTAGAGCTA- |
| | | CCTTCCCGACTTCCGTAGGAGCGC- |
| | | TTTTTTTTcagccaactccaaTTTTTTTT- |
| | | GCGCTCCTACGGAAGTCGGGAAGG |
| TCF15 | 1570 | -GTCGCCATTGGCCA-GTTTTAGAGCTA- |
| | | CCTTCCCGACTTCCGTAGGAGCGC- |
| | | TTTTTTTTcagccaactccaaTTTTTTTT- |
| | | GCGCTCCTACGGAAGTCGGGAAGG |
| TCF15 | 1571 | g-CTCCCTCGCCTATA-GTTTTAGAGCTA- |
| | | CCTTCCCGACTTCCGTAGGAGCGC- |
| | | TTTTTTTTcagccaactccaaTTTTTTTT- |
| | | GCGCTCCTACGGAAGTCGGGAAGG |
| TCF15 | 1572 | -GGCCCGGGAGCCGG-GTTTTAGAGCTA- |
| | | CCTTCCCGACTTCCGTAGGAGCGC- |
| | | TTTTTTTTcagccaactccaaTTTTTTTT- |
| | | GCGCTCCTACGGAAGTCGGGAAGG |
| TCF15 | 1573 | g-AAAAGTTCGGATCT-GTTTTAGAGCTA- |
| | | CCTGAAGGTAAAGATCGGGTCCTC- |
| | | TTTTTTTTcagccaactccaaTTTTTTTT- |
| | | GAGGACCCGATCTTTACCTTCAGG |
| TCF15 | 1574 | -GTCGCCATTGGCCA-GTTTTAGAGCTA- |
| | | CCTGAAGGTAAAGATCGGGTCCTC- |
| | | TTTTTTTTcagccaactccaaTTTTTTTT- |
| | | GAGGACCCGATCTTTACCTTCAGG |
| TCF15 | 1575 | g-CTCCCTCGCCTATA-GTTTTAGAGCTA- |
| | | CCTGAAGGTAAAGATCGGGTCCTC- |
| | | TTTTTTTTcagccaactccaaTTTTTTTT- |
| | | GAGGACCCGATCTTTACCTTCAGG |
| TCF15 | 1576 | -GGCCCGGGAGCCGG-GTTTTAGAGCTA- |
| | | CCTGAAGGTAAAGATCGGGTCCTC- |
| | | TTTTTTTTcagccaactccaaTTTTTTTT- |
| | | GAGGACCCGATCTTTACCTTCAGG |
| TCF15 | 1577 | g-AAAAGTTCGGATCT-GTTTTAGAGCTA- |
| | | CCTGGTTATAGCGGACGCACTGT- |
| | | TTTTTTTTcagccaactccaaTTTTTTTT- |
| | | ACAGTGCGTCCGCTATAACCAGG |
| TCF15 | 1578 | -GTCGCCATTGGCCA-GTTTTAGAGCTA- |
| | | CCTGGTTATAGCGGACGCACTGT- |
| | | TTTTTTTTcagccaactccaaTTTTTTTT- |
| | | ACAGTGCGTCCGCTATAACCAGG |
| TCF15 | 1579 | g-CTCCCTCGCCTATA-GTTTTAGAGCTA- |
| | | CCTGGTTATAGCGGACGCACTGT- |
| | | TTTTTTTTcagccaactccaaTTTTTTTT- |
| | | ACAGTGCGTCCGCTATAACCAGG |
| TCF15 | 1580 | -GGCCCGGGAGCCGG-GTTTTAGAGCTA- |
| | | CCTGGTTATAGCGGACGCACTGT- |
| | | TTTTTTTTcagccaactccaaTTTTTTTT- |
| | | ACAGTGCGTCCGCTATAACCAGG |
| TCF15 | 1581 | g-AAAAGTTCGGATCT-GTTTTAGAGCTA- |
| | | CCGCATCGTATTATCTGCGAAGC- |
| | | TTTTTTTTcagccaactccaaTTTTTTTT- |
| | | GCTTCGCAGATAATACGATGCGG |
| TCF15 | 1582 | -GTCGCCATTGGCCA-GTTTTAGAGCTA- |
| | | CCGCATCGTATTATCTGCGAAGC- |
| | | TTTTTTTTcagccaactccaaTTTTTTTT- |
| | | GCTTCGCAGATAATACGATGCGG |
| TCF15 | 1583 | g-CTCCCTCGCCTATA-GTTTTAGAGCTA- |
| | | CCGCATCGTATTATCTGCGAAGC- |
| | | TTTTTTTTcagccaactccaaTTTTTTTT- |
| | | GCTTCGCAGATAATACGATGCGG |
| TCF15 | 1584 | -GGCCCGGGAGCCGG-GTTTTAGAGCTA- |
| | | CCGCATCGTATTATCTGCGAAGC- |
| | | TTTTTTTTcagccaactccaaTTTTTTTT- |
| | | GCTTCGCAGATAATACGATGCGG |
| TCF15 | 1585 | g-AAAAGTTCGGATCT-GTTTTAGAGCTA- |
| | | CCGCTAGGACGTTCAACGGAGTC- |
| | | TTTTTTTTcagccaactccaaTTTTTTTT- |
| | | GACTCCGTTGAACGTCCTAGCGG |
| TCF15 | 1586 | -GTCGCCATTGGCCA-GTTTTAGAGCTA- |
| | | CCGCTAGGACGTTCAACGGAGTC- |
| | | TTTTTTTTcagccaactccaaTTTTTTTT- |
| | | GACTCCGTTGAACGTCCTAGCGG |
| TCF15 | 1587 | g-CTCCCTCGCCTATA-GTTTTAGAGCTA- |
| | | CCGCTAGGACGTTCAACGGAGTC- |
| | | TTTTTTTTcagccaactccaaTTTTTTTT- |
| | | GACTCCGTTGAACGTCCTAGCGG |
| TCF15 | 1588 | -GGCCCGGGAGCCGG-GTTTTAGAGCTA- |
| | | CCGCTAGGACGTTCAACGGAGTC- |
| | | TTTTTTTTcagccaactccaaTTTTTTTT- |
| | | GACTCCGTTGAACGTCCTAGCGG |
| TCF15 | 1589 | g-AAAAGTTCGGATCT-GTTTTAGAGCTA- |
| | | CCATAGCGGTACTATCGGCATCT- |
| | | TTTTTTTTcagccaactccaaTTTTTTTT- |
| | | AGATGCCGATAGTACCGCTATGG |
| TCF15 | 1590 | -GTCGCCATTGGCCA-GTTTTAGAGCTA- |
| | | CCATAGCGGTACTATCGGCATCT- |
| | | TTTTTTTTcagccaactccaaTTTTTTTT- |
| | | AGATGCCGATAGTACCGCTATGG |
| TCF15 | 1591 | g-CTCCCTCGCCTATA-GTTTTAGAGCTA- |
| | | CCATAGCGGTACTATCGGCATCT- |
| | | TTTTTTTTcagccaactccaaTTTTTTTT- |
| | | AGATGCCGATAGTACCGCTATGG |
| TCF15 | 1592 | -GGCCCGGGAGCCGG-GTTTTAGAGCTA- |
| | | CCATAGCGGTACTATCGGCATCT- |
| | | TTTTTTTTcagccaactccaaTTTTTTTT- |
| | | AGATGCCGATAGTACCGCTATGG |
| TCF15 | 1593 | g-AAAAGTTCGGATCT-GTTTTAGAGCTA- |
| | | CCTCGTACTAGTCTCGCATGACC- |
| | | TTTTTTTTcagccaactccaaTTTTTTTT- |
| | | GGTCATGCGAGACTAGTACGAGG |
| TCF15 | 1594 | -GTCGCCATTGGCCA-GTTTTAGAGCTA- |
| | | CCTCGTACTAGTCTCGCATGACC- |
| | | TTTTTTTTcagccaactccaaTTTTTTTT- |
| | | GGTCATGCGAGACTAGTACGAGG |
| TCF15 | 1595 | g-CTCCCTCGCCTATA-GTTTTAGAGCTA- |
| | | CCTCGTACTAGTCTCGCATGACC- |
| | | TTTTTTTTcagccaactccaaTTTTTTTT- |
| | | GGTCATGCGAGACTAGTACGAGG |
| TCF15 | 1596 | -GGCCCGGGAGCCGG-GTTTTAGAGCTA- |
| | | CCTCGTACTAGTCTCGCATGACC- |
| | | TTTTTTTTcagccaactccaaTTTTTTTT- |
| | | GGTCATGCGAGACTAGTACGAGG |
| TCF15 | 1597 | g-AAAAGTTCGGATCT-GTTTTAGAGCTA- |
| | | CCGATAGTGCTAAACGACGCTTT- |
| | | TTTTTTTTcagccaactccaaTTTTTTTT- |
| | | AAAGCGTCGTTTAGCACTATCGG |
| TCF15 | 1598 | -GTCGCCATTGGCCA-GTTTTAGAGCTA- |
| | | CCGATAGTGCTAAACGACGCTTT- |
| | | TTTTTTTTcagccaactccaaTTTTTTTT- |
| | | AAAGCGTCGTTTAGCACTATCGG |
| TCF15 | 1599 | g-CTCCCTCGCCTATA-GTTTTAGAGCTA- |
| | | CCGATAGTGCTAAACGACGCTTT- |
| | | TTTTTTTTcagccaactccaaTTTTTTTT- |
| | | AAAGCGTCGTTTAGCACTATCGG |
| TCF15 | 1600 | -GGCCCGGGAGCCGG-GTTTTAGAGCTA- |
| | | CCGATAGTGCTAAACGACGCTTT- |
| | | TTTTTTTTcagccaactccaaTTTTTTTT- |
| | | AAAGCGTCGTTTAGCACTATCGG |
| TCF15 | 1601 | g-AAAAGTTCGGATCT-GTTTTAGAGCTA- |
| | | CCCGTTATCGACGTTCAAGGAAC- |
| | | TTTTTTTTcagccaactccaaTTTTTTTT- |
| | | GTTCCTTGAACGTCGATAACGGG |
| TCF15 | 1602 | -GTCGCCATTGGCCA-GTTTTAGAGCTA- |
| | | CCCGTTATCGACGTTCAAGGAAC- |
| | | TTTTTTTTcagccaactccaaTTTTTTTT- |
| | | GTTCCTTGAACGTCGATAACGGG |
| TCF15 | 1603 | g-CTCCCTCGCCTATA-GTTTTAGAGCTA- |
| | | CCCGTTATCGACGTTCAAGGAAC- |
| | | TTTTTTTTcagccaactccaaTTTTTTTT- |
| | | GTTCCTTGAACGTCGATAACGGG |
| TCF15 | 1604 | -GGCCCGGGAGCCGG-GTTTTAGAGCTA- |
| | | CCCGTTATCGACGTTCAAGGAAC- |
| | | TTTTTTTTcagccaactccaaTTTTTTTT- |
| | | GTTCCTTGAACGTCGATAACGGG |
| TCF15 | 1605 | g-AAAAGTTCGGATCT-GTTTTAGAGCTA- |
| | | CCGATCAATGCGGTCTGCGTAAC- |
| | | TTTTTTTTcagccaactccaaTTTTTTTT- |
| | | GTTACGCAGACCGCATTGATCGG |
| TCF15 | 1606 | -GTCGCCATTGGCCA-GTTTTAGAGCTA- |
| | | CCGATCAATGCGGTCTGCGTAAC- |
| | | TTTTTTTTcagccaactccaaTTTTTTTT- |
| | | GTTACGCAGACCGCATTGATCGG |
| TCF15 | 1607 | g-CTCCCTCGCCTATA-GTTTTAGAGCTA- |
| | | CCGATCAATGCGGTCTGCGTAAC- |
| | | TTTTTTTTcagccaactccaaTTTTTTTT- |
| | | GTTACGCAGACCGCATTGATCGG |
| TCF15 | 1608 | -GGCCCGGGAGCCGG-GTTTTAGAGCTA- |
| | | CCGATCAATGCGGTCTGCGTAAC- |
| | | TTTTTTTTcagccaactccaaTTTTTTTT- |
| | | GTTACGCAGACCGCATTGATCGG |
| TCF15 | 1609 | g-AAAAGTTCGGATCT-GTTTTAGAGCTA- |
| | | CCCTTACTCGCGATACTCTCGAC- |
| | | TTTTTTTTcagccaactccaaTTTTTTTT- |
| | | GTCGAGAGTATCGCGAGTAAGGG |
| TCF15 | 1610 | -GTCGCCATTGGCCA-GTTTTAGAGCTA- |
| | | CCCTTACTCGCGATACTCTCGAC- |
| | | TTTTTTTTcagccaactccaaTTTTTTTT- |
| | | GTCGAGAGTATCGCGAGTAAGGG |
| TCF15 | 1611 | g-CTCCCTCGCCTATA-GTTTTAGAGCTA- |
| | | CCCTTACTCGCGATACTCTCGAC- |
| | | TTTTTTTTcagccaactccaaTTTTTTTT- |
| | | GTCGAGAGTATCGCGAGTAAGGG |
| TCF15 | 1612 | -GGCCCGGGAGCCGG-GTTTTAGAGCTA- |
| | | CCCTTACTCGCGATACTCTCGAC- |
| | | TTTTTTTTcagccaactccaaTTTTTTTT- |
| | | GTCGAGAGTATCGCGAGTAAGGG |
| TCF15 | 1613 | g-AAAAGTTCGGATCT-GTTTTAGAGCTA- |
| | | CCGCGGACGGTAAGCACGGAATA- |
| | | TTTTTTTTcagccaactccaaTTTTTTTT- |
| | | TATTCCGTGCTTACCGTCCGCGG |
| TCF15 | 1614 | -GTCGCCATTGGCCA-GTTTTAGAGCTA- |
| | | CCGCGGACGGTAAGCACGGAATA- |
| | | TTTTTTTTcagccaactccaaTTTTTTTT- |
| | | TATTCCGTGCTTACCGTCCGCGG |
| TCF15 | 1615 | g-CTCCCTCGCCTATA-GTTTTAGAGCTA- |
| | | CCGCGGACGGTAAGCACGGAATA- |
| | | TTTTTTTTcagccaactccaaTTTTTTTT- |
| | | TATTCCGTGCTTACCGTCCGCGG |
| TCF15 | 1616 | -GGCCCGGGAGCCGG-GTTTTAGAGCTA- |
| | | CCGCGGACGGTAAGCACGGAATA- |
| | | TTTTTTTTcagccaactccaaTTTTTTTT- |
| | | TATTCCGTGCTTACCGTCCGCGG |
| TCF15 | 1617 | g-AAAAGTTCGGATCT-GTTTTAGAGCTA- |
| | | CCTATAGTCACGAATCGTAGGGT- |
| | | TTTTTTTTcagccaactccaaTTTTTTTT- |
| | | ACCCTACGATTCGTGACTATAGG |
| TCF15 | 1618 | -GTCGCCATTGGCCA-GTTTTAGAGCTA- |
| | | CCTATAGTCACGAATCGTAGGGT- |
| | | TTTTTTTTcagccaactccaaTTTTTTTT- |
| | | ACCCTACGATTCGTGACTATAGG |
| TCF15 | 1619 | g-CTCCCTCGCCTATA-GTTTTAGAGCTA- |
| | | CCTATAGTCACGAATCGTAGGGT- |
| | | TTTTTTTTcagccaactccaaTTTTTTTT- |
| | | ACCCTACGATTCGTGACTATAGG |
| TCF15 | 1620 | -GGCCCGGGAGCCGG-GTTTTAGAGCTA- |
| | | CCTATAGTCACGAATCGTAGGGT- |
| | | TTTTTTTTcagccaactccaaTTTTTTTT- |
| | | ACCCTACGATTCGTGACTATAGG |
| TCF15 | 1621 | g-AAAAGTTCGGATCT-GTTTTAGAGCTA- |
| | | CCCGTCGTCACGTATGCGTAGCA- |
| | | TTTTTTTTcagccaactccaaTTTTTTTT- |
| | | TGCTACGCATACGTGACGACGGG |
| TCF15 | 1622 | -GTCGCCATTGGCCA-GTTTTAGAGCTA- |
| | | CCCGTCGTCACGTATGCGTAGCA- |
| | | TTTTTTTTcagccaactccaaTTTTTTTT- |
| | | TGCTACGCATACGTGACGACGGG |
| TCF15 | 1623 | g-CTCCCTCGCCTATA-GTTTTAGAGCTA- |
| | | CCCGTCGTCACGTATGCGTAGCA- |
| | | TTTTTTTTcagccaactccaaTTTTTTTT- |
| | | TGCTACGCATACGTGACGACGGG |
| TCF15 | 1624 | -GGCCCGGGAGCCGG-GTTTTAGAGCTA- |
| | | CCCGTCGTCACGTATGCGTAGCA- |
| | | TTTTTTTTcagccaactccaaTTTTTTTT- |
| | | TGCTACGCATACGTGACGACGGG |
| TCF15 | 1625 | g-AAAAGTTCGGATCT-GTTTTAGAGCTA- |
| | | CCCGAGAGGTAGTAGACGACGCA- |
| | | TTTTTTTTcagccaactccaaTTTTTTTT- |
| | | TGCGTCGTCTACTACCTCTCGGG |
| TCF15 | 1626 | -GTCGCCATTGGCCA-GTTTTAGAGCTA- |
| | | CCCGAGAGGTAGTAGACGACGCA- |
| | | TTTTTTTTcagccaactccaaTTTTTTTT- |
| | | TGCGTCGTCTACTACCTCTCGGG |
| TCF15 | 1627 | g-CTCCCTCGCCTATA-GTTTTAGAGCTA- |
| | | CCCGAGAGGTAGTAGACGACGCA- |
| | | TTTTTTTTcagccaactccaaTTTTTTTT- |
| | | TGCGTCGTCTACTACCTCTCGGG |
| TCF15 | 1628 | -GGCCCGGGAGCCGG-GTTTTAGAGCTA- |
| | | CCCGAGAGGTAGTAGACGACGCA- |
| | | TTTTTTTTcagccaactccaaTTTTTTTT- |
| | | TGCGTCGTCTACTACCTCTCGGG |
| TCF15 | 1629 | g-AAAAGTTCGGATCT-GTTTTAGAGCTA- |
| | | CCGACGTCTACGGACGGGAGCTA- |
| | | TTTTTTTTcagccaactccaaTTTTTTTT- |
| | | TAGCTCCCGTCCGTAGACGTCGG |
| TCF15 | 1630 | -GTCGCCATTGGCCA-GTTTTAGAGCTA- |
| | | CCGACGTCTACGGACGGGAGCTA- |
| | | TTTTTTTTcagccaactccaaTTTTTTTT- |
| | | TAGCTCCCGTCCGTAGACGTCGG |
| TCF15 | 1631 | g-CTCCCTCGCCTATA-GTTTTAGAGCTA- |
| | | CCGACGTCTACGGACGGGAGCTA- |
| | | TTTTTTTTcagccaactccaaTTTTTTTT- |
| | | TAGCTCCCGTCCGTAGACGTCGG |
| TCF15 | 1632 | -GGCCCGGGAGCCGG-GTTTTAGAGCTA- |
| | | CCGACGTCTACGGACGGGAGCTA- |
| | | TTTTTTTTcagccaactccaaTTTTTTTT- |
| | | TAGCTCCCGTCCGTAGACGTCGG |
| TCF15 | 1633 | g-AAAAGTTCGGATCT-GTTTTAGAGCTA- |
| | | CCAAAGCTCATTCGCGACTGAGC- |
| | | TTTTTTTTcagccaactccaaTTTTTTTT- |
| | | GCTCAGTCGCGAATGAGCTTTGG |
| TCF15 | 1634 | -GTCGCCATTGGCCA-GTTTTAGAGCTA- |
| | | CCAAAGCTCATTCGCGACTGAGC- |
| | | TTTTTTTTcagccaactccaaTTTTTTTT- |
| | | GCTCAGTCGCGAATGAGCTTTGG |
| TCF15 | 1635 | g-CTCCCTCGCCTATA-GTTTTAGAGCTA- |
| | | CCAAAGCTCATTCGCGACTGAGC- |
| | | TTTTTTTTcagccaactccaaTTTTTTTT- |
| | | GCTCAGTCGCGAATGAGCTTTGG |
| TCF15 | 1636 | -GGCCCGGGAGCCGG-GTTTTAGAGCTA- |
| | | CCAAAGCTCATTCGCGACTGAGC- |
| | | TTTTTTTTcagccaactccaaTTTTTTTT- |
| | | GCTCAGTCGCGAATGAGCTTTGG |
| TCF15 | 1637 | g-AAAAGTTCGGATCT-GTTTTAGAGCTA- |
| | | CCATGGCACGATCGACACGGAGG- |
| | | TTTTTTTTcagccaactccaaTTTTTTTT- |
| | | CCTCCGTGTCGATCGTGCCATGG |
| TCF15 | 1638 | -GTCGCCATTGGCCA-GTTTTAGAGCTA- |
| | | CCATGGCACGATCGACACGGAGG- |
| | | TTTTTTTTcagccaactccaaTTTTTTTT- |
| | | CCTCCGTGTCGATCGTGCCATGG |
| TCF15 | 1639 | g-CTCCCTCGCCTATA-GTTTTAGAGCTA- |
| | | CCATGGCACGATCGACACGGAGG- |
| | | TTTTTTTTcagccaactccaaTTTTTTTT- |
| | | CCTCCGTGTCGATCGTGCCATGG |
| TCF15 | 1640 | -GGCCCGGGAGCCGG-GTTTTAGAGCTA- |
| | | CCATGGCACGATCGACACGGAGG- |
| | | TTTTTTTTcagccaactccaaTTTTTTTT- |
| | | CCTCCGTGTCGATCGTGCCATGG |
| TCF15 | 1641 | g-AAAAGTTCGGATCT-GTTTTAGAGCTA- |
| | | CCCGAACTCTCTATCGAACGAGT- |
| | | TTTTTTTTcagccaactccaaTTTTTTTT- |
| | | ACTCGTTCGATAGAGAGTTCGGG |
| TCF15 | 1642 | -GTCGCCATTGGCCA-GTTTTAGAGCTA- |
| | | CCCGAACTCTCTATCGAACGAGT- |
| | | TTTTTTTTcagccaactccaaTTTTTTTT- |
| | | ACTCGTTCGATAGAGAGTTCGGG |
| TCF15 | 1643 | g-CTCCCTCGCCTATA-GTTTTAGAGCTA- |
| | | CCCGAACTCTCTATCGAACGAGT- |
| | | TTTTTTTTcagccaactccaaTTTTTTTT- |
| | | ACTCGTTCGATAGAGAGTTCGGG |
| TCF15 | 1644 | -GGCCCGGGAGCCGG-GTTTTAGAGCTA- |
| | | CCCGAACTCTCTATCGAACGAGT- |
| | | TTTTTTTTcagccaactccaaTTTTTTTT- |
| | | ACTCGTTCGATAGAGAGTTCGGG |
| TCF15 | 1645 | g-AAAAGTTCGGATCT-GTTTTAGAGCTA- |
| | | CCTACACGATAGTGGTCGTGCGC- |
| | | TTTTTTTTcagccaactccaaTTTTTTTT- |
| | | GCGCACGACCACTATCGTGTAGG |
| TCF15 | 1646 | -GTCGCCATTGGCCA-GTTTTAGAGCTA- |
| | | CCTACACGATAGTGGTCGTGCGC- |
| | | TTTTTTTTcagccaactccaaTTTTTTTT- |
| | | GCGCACGACCACTATCGTGTAGG |
| TCF15 | 1647 | g-CTCCCTCGCCTATA-GTTTTAGAGCTA- |
| | | CCTACACGATAGTGGTCGTGCGC- |
| | | TTTTTTTTcagccaactccaaTTTTTTTT- |
| | | GCGCACGACCACTATCGTGTAGG |
| TCF15 | 1648 | -GGCCCGGGAGCCGG-GTTTTAGAGCTA- |
| | | CCTACACGATAGTGGTCGTGCGC- |
| | | TTTTTTTTcagccaactccaaTTTTTTTT- |
| | | GCGCACGACCACTATCGTGTAGG |
| TCF15 | 1649 | g-AAAAGTTCGGATCT-GTTTTAGAGCTA- |
| | | CCCTGGCGGAACGTTCGAGTAAT- |
| | | TTTTTTTTcagccaactccaaTTTTTTTT- |
| | | ATTACTCGAACGTTCCGCCAGGG |
| TCF15 | 1650 | -GTCGCCATTGGCCA-GTTTTAGAGCTA- |
| | | CCCTGGCGGAACGTTCGAGTAAT- |
| | | TTTTTTTTcagccaactccaaTTTTTTTT- |
| | | ATTACTCGAACGTTCCGCCAGGG |
| TCF15 | 1651 | g-CTCCCTCGCCTATA-GTTTTAGAGCTA- |
| | | CCCTGGCGGAACGTTCGAGTAAT- |
| | | TTTTTTTTcagccaactccaaTTTTTTTT- |
| | | ATTACTCGAACGTTCCGCCAGGG |
| TCF15 | 1652 | -GGCCCGGGAGCCGG-GTTTTAGAGCTA- |
| | | CCCTGGCGGAACGTTCGAGTAAT- |
| | | TTTTTTTTcagccaactccaaTTTTTTTT- |
| | | ATTACTCGAACGTTCCGCCAGGG |
| TCF15 | 1653 | g-AAAAGTTCGGATCT-GTTTTAGAGCTA- |
| | | CCTACACTCGACATCGGTAGCTA- |
| | | TTTTTTTTcagccaactccaaTTTTTTTT- |
| | | TAGCTACCGATGTCGAGTGTAGG |
| TCF15 | 1654 | -GTCGCCATTGGCCA-GTTTTAGAGCTA- |
| | | CCTACACTCGACATCGGTAGCTA- |
| | | TTTTTTTTcagccaactccaaTTTTTTTT- |
| | | TAGCTACCGATGTCGAGTGTAGG |
| TCF15 | 1655 | g-CTCCCTCGCCTATA-GTTTTAGAGCTA- |
| | | CCTACACTCGACATCGGTAGCTA- |
| | | TTTTTTTTcagccaactccaaTTTTTTTT- |
| | | TAGCTACCGATGTCGAGTGTAGG |
| TCF15 | 1656 | -GGCCCGGGAGCCGG-GTTTTAGAGCTA- |
| | | CCTACACTCGACATCGGTAGCTA- |
| | | TTTTTTTTcagccaactccaaTTTTTTTT- |
| | | TAGCTACCGATGTCGAGTGTAGG |
| TCF7L2 | 1657 | g-ATCCTTTCGGGCGC-GTTTTAGAGCTA- |
| | | CCGTCGTTGTACCGTCTACTTGAC- |
| | | TTTTTTTTcagccaactccaaTTTTTTTT- |
| | | GTCAAGTAGACGGTACAACGACGG |
| TCF7L2 | 1658 | g-ATGCACACGTCACT-GTTTTAGAGCTA- |
| | | CCGTCGTTGTACCGTCTACTTGAC- |
| | | TTTTTTTTcagccaactccaaTTTTTTTT- |
| | | GTCAAGTAGACGGTACAACGACGG |
| TCF7L2 | 1659 | -GAACGGAGTAGTCT-GTTTTAGAGCTA- |
| | | CCGTCGTTGTACCGTCTACTTGAC- |
| | | TTTTTTTTcagccaactccaaTTTTTTTT- |
| | | GTCAAGTAGACGGTACAACGACGG |
| TCF7L2 | 1660 | -GGGATTCTGGGCGA-GTTTTAGAGCTA- |
| | | CCGTCGTTGTACCGTCTACTTGAC- |
| | | TTTTTTTTcagccaactccaaTTTTTTTT- |
| | | GTCAAGTAGACGGTACAACGACGG |
| TCF7L2 | 1661 | g-ATCCTTTCGGGCGC-GTTTTAGAGCTA- |
| | | CCTTCCCGACTTCCGTAGGAGCGC- |
| | | TTTTTTTTcagccaactccaaTTTTTTTT- |
| | | GCGCTCCTACGGAAGTCGGGAAGG |
| TCF7L2 | 1662 | g-ATGCACACGTCACT-GTTTTAGAGCTA- |
| | | CCTTCCCGACTTCCGTAGGAGCGC- |
| | | TTTTTTTTcagccaactccaaTTTTTTTT- |
| | | GCGCTCCTACGGAAGTCGGGAAGG |
| TCF7L2 | 1663 | -GAACGGAGTAGTCT-GTTTTAGAGCTA- |
| | | CCTTCCCGACTTCCGTAGGAGCGC- |
| | | TTTTTTTTcagccaactccaaTTTTTTTT- |
| | | GCGCTCCTACGGAAGTCGGGAAGG |
| TCF7L2 | 1664 | -GGGATTCTGGGCGA-GTTTTAGAGCTA- |
| | | CCTTCCCGACTTCCGTAGGAGCGC- |
| | | TTTTTTTTcagccaactccaaTTTTTTTT- |
| | | GCGCTCCTACGGAAGTCGGGAAGG |
| TCF7L2 | 1665 | g-ATCCTTTCGGGCGC-GTTTTAGAGCTA- |
| | | CCTGAAGGTAAAGATCGGGTCCTC- |
| | | TTTTTTTTcagccaactccaaTTTTTTTT- |
| | | GAGGACCCGATCTTTACCTTCAGG |
| TCF7L2 | 1666 | g-ATGCACACGTCACT-GTTTTAGAGCTA- |
| | | CCTGAAGGTAAAGATCGGGTCCTC- |
| | | TTTTTTTTcagccaactccaaTTTTTTTT- |
| | | GAGGACCCGATCTTTACCTTCAGG |
| TCF7L2 | 1667 | -GAACGGAGTAGTCT-GTTTTAGAGCTA- |
| | | CCTGAAGGTAAAGATCGGGTCCTC- |
| | | TTTTTTTTcagccaactccaaTTTTTTTT- |
| | | GAGGACCCGATCTTTACCTTCAGG |
| TCF7L2 | 1668 | -GGGATTCTGGGCGA-GTTTTAGAGCTA- |
| | | CCTGAAGGTAAAGATCGGGTCCTC- |
| | | TTTTTTTTcagccaactccaaTTTTTTTT- |
| | | GAGGACCCGATCTTTACCTTCAGG |
| TCF7L2 | 1669 | g-ATCCTTTCGGGCGC-GTTTTAGAGCTA- |
| | | CCTGGTTATAGCGGACGCACTGT- |
| | | TTTTTTTTcagccaactccaaTTTTTTTT- |
| | | ACAGTGCGTCCGCTATAACCAGG |
| TCF7L2 | 1670 | g-ATGCACACGTCACT-GTTTTAGAGCTA- |
| | | CCTGGTTATAGCGGACGCACTGT- |
| | | TTTTTTTTcagccaactccaaTTTTTTTT- |
| | | ACAGTGCGTCCGCTATAACCAGG |
| TCF7L2 | 1671 | -GAACGGAGTAGTCT-GTTTTAGAGCTA- |
| | | CCTGGTTATAGCGGACGCACTGT- |
| | | TTTTTTTTcagccaactccaaTTTTTTTT- |
| | | ACAGTGCGTCCGCTATAACCAGG |
| TCF7L2 | 1672 | -GGGATTCTGGGCGA-GTTTTAGAGCTA- |
| | | CCTGGTTATAGCGGACGCACTGT- |
| | | TTTTTTTTcagccaactccaaTTTTTTTT- |
| | | ACAGTGCGTCCGCTATAACCAGG |
| TCF7L2 | 1673 | g-ATCCTTTCGGGCGC-GTTTTAGAGCTA- |
| | | CCGCATCGTATTATCTGCGAAGC- |
| | | TTTTTTTTcagccaactccaaTTTTTTTT- |
| | | GCTTCGCAGATAATACGATGCGG |
| TCF7L2 | 1674 | g-ATGCACACGTCACT-GTTTTAGAGCTA- |
| | | CCGCATCGTATTATCTGCGAAGC- |
| | | TTTTTTTTcagccaactccaaTTTTTTTT- |
| | | GCTTCGCAGATAATACGATGCGG |
| TCF7L2 | 1675 | -GAACGGAGTAGTCT-GTTTTAGAGCTA- |
| | | CCGCATCGTATTATCTGCGAAGC- |
| | | TTTTTTTTcagccaactccaaTTTTTTTT- |
| | | GCTTCGCAGATAATACGATGCGG |
| TCF7L2 | 1676 | -GGGATTCTGGGCGA-GTTTTAGAGCTA- |
| | | CCGCATCGTATTATCTGCGAAGC- |
| | | TTTTTTTTcagccaactccaaTTTTTTTT- |
| | | GCTTCGCAGATAATACGATGCGG |
| TCF7L2 | 1677 | g-ATCCTTTCGGGCGC-GTTTTAGAGCTA- |
| | | CCGCTAGGACGTTCAACGGAGTC- |
| | | TTTTTTTTcagccaactccaaTTTTTTTT- |
| | | GACTCCGTTGAACGTCCTAGCGG |
| TCF7L2 | 1678 | g-ATGCACACGTCACT-GTTTTAGAGCTA- |
| | | CCGCTAGGACGTTCAACGGAGTC- |
| | | TTTTTTTTcagccaactccaaTTTTTTTT- |
| | | GACTCCGTTGAACGTCCTAGCGG |
| TCF7L2 | 1679 | -GAACGGAGTAGTCT-GTTTTAGAGCTA- |
| | | CCGCTAGGACGTTCAACGGAGTC- |
| | | TTTTTTTTcagccaactccaaTTTTTTTT- |
| | | GACTCCGTTGAACGTCCTAGCGG |
| TCF7L2 | 1680 | -GGGATTCTGGGCGA-GTTTTAGAGCTA- |
| | | CCGCTAGGACGTTCAACGGAGTC- |
| | | TTTTTTTTcagccaactccaaTTTTTTTT- |
| | | GACTCCGTTGAACGTCCTAGCGG |
| TCF7L2 | 1681 | g-ATCCTTTCGGGCGC-GTTTTAGAGCTA- |
| | | CCATAGCGGTACTATCGGCATCT- |
| | | TTTTTTTTcagccaactccaaTTTTTTTT- |
| | | AGATGCCGATAGTACCGCTATGG |
| TCF7L2 | 1682 | g-ATGCACACGTCACT-GTTTTAGAGCTA- |
| | | CCATAGCGGTACTATCGGCATCT- |
| | | TTTTTTTTcagccaactccaaTTTTTTTT- |
| | | AGATGCCGATAGTACCGCTATGG |
| TCF7L2 | 1683 | -GAACGGAGTAGTCT-GTTTTAGAGCTA- |
| | | CCATAGCGGTACTATCGGCATCT- |
| | | TTTTTTTTcagccaactccaaTTTTTTTT- |
| | | AGATGCCGATAGTACCGCTATGG |
| TCF7L2 | 1684 | -GGGATTCTGGGCGA-GTTTTAGAGCTA- |
| | | CCATAGCGGTACTATCGGCATCT- |
| | | TTTTTTTTcagccaactccaaTTTTTTTT- |
| | | AGATGCCGATAGTACCGCTATGG |
| TCF7L2 | 1685 | g-ATCCTTTCGGGCGC-GTTTTAGAGCTA- |
| | | CCTCGTACTAGTCTCGCATGACC- |
| | | TTTTTTTTcagccaactccaaTTTTTTTT- |
| | | GGTCATGCGAGACTAGTACGAGG |
| TCF7L2 | 1686 | g-ATGCACACGTCACT-GTTTTAGAGCTA- |
| | | CCTCGTACTAGTCTCGCATGACC- |
| | | TTTTTTTTcagccaactccaaTTTTTTTT- |
| | | GGTCATGCGAGACTAGTACGAGG |
| TCF7L2 | 1687 | -GAACGGAGTAGTCT-GTTTTAGAGCTA- |
| | | CCTCGTACTAGTCTCGCATGACC- |
| | | TTTTTTTTcagccaactccaaTTTTTTTT- |
| | | GGTCATGCGAGACTAGTACGAGG |
| TCF7L2 | 1688 | -GGGATTCTGGGCGA-GTTTTAGAGCTA- |
| | | CCTCGTACTAGTCTCGCATGACC- |
| | | TTTTTTTTcagccaactccaaTTTTTTTT- |
| | | GGTCATGCGAGACTAGTACGAGG |
| TCF7L2 | 1689 | g-ATCCTTTCGGGCGC-GTTTTAGAGCTA- |
| | | CCGATAGTGCTAAACGACGCTTT- |
| | | TTTTTTTTcagccaactccaaTTTTTTTT- |
| | | AAAGCGTCGTTTAGCACTATCGG |
| TCF7L2 | 1690 | g-ATGCACACGTCACT-GTTTTAGAGCTA- |
| | | CCGATAGTGCTAAACGACGCTTT- |
| | | TTTTTTTTcagccaactccaaTTTTTTTT- |
| | | AAAGCGTCGTTTAGCACTATCGG |
| TCF7L2 | 1691 | -GAACGGAGTAGTCT-GTTTTAGAGCTA- |
| | | CCGATAGTGCTAAACGACGCTTT- |
| | | TTTTTTTTcagccaactccaaTTTTTTTT- |
| | | AAAGCGTCGTTTAGCACTATCGG |
| TCF7L2 | 1692 | -GGGATTCTGGGCGA-GTTTTAGAGCTA- |
| | | CCGATAGTGCTAAACGACGCTTT- |
| | | TTTTTTTTcagccaactccaaTTTTTTTT- |
| | | AAAGCGTCGTTTAGCACTATCGG |
| TCF7L2 | 1693 | g-ATCCTTTCGGGCGC-GTTTTAGAGCTA- |
| | | CCCGTTATCGACGTTCAAGGAAC- |
| | | TTTTTTTTcagccaactccaaTTTTTTTT- |
| | | GTTCCTTGAACGTCGATAACGGG |
| TCF7L2 | 1694 | g-ATGCACACGTCACT-GTTTTAGAGCTA- |
| | | CCCGTTATCGACGTTCAAGGAAC- |
| | | TTTTTTTTcagccaactccaaTTTTTTTT- |
| | | GTTCCTTGAACGTCGATAACGGG |
| TCF7L2 | 1695 | -GAACGGAGTAGTCT-GTTTTAGAGCTA- |
| | | CCCGTTATCGACGTTCAAGGAAC- |
| | | TTTTTTTTcagccaactccaaTTTTTTTT- |
| | | GTTCCTTGAACGTCGATAACGGG |
| TCF7L2 | 1696 | -GGGATTCTGGGCGA-GTTTTAGAGCTA- |
| | | CCCGTTATCGACGTTCAAGGAAC- |
| | | TTTTTTTTcagccaactccaaTTTTTTTT- |
| | | GTTCCTTGAACGTCGATAACGGG |
| TCF7L2 | 1697 | g-ATCCTTTCGGGCGC-GTTTTAGAGCTA- |
| | | CCGATCAATGCGGTCTGCGTAAC- |
| | | TTTTTTTTcagccaactccaaTTTTTTTT- |
| | | GTTACGCAGACCGCATTGATCGG |
| TCF7L2 | 1698 | g-ATGCACACGTCACT-GTTTTAGAGCTA- |
| | | CCGATCAATGCGGTCTGCGTAAC- |
| | | TTTTTTTTcagccaactccaaTTTTTTTT- |
| | | GTTACGCAGACCGCATTGATCGG |
| TCF7L2 | 1699 | -GAACGGAGTAGTCT-GTTTTAGAGCTA- |
| | | CCGATCAATGCGGTCTGCGTAAC- |
| | | TTTTTTTTcagccaactccaaTTTTTTTT- |
| | | GTTACGCAGACCGCATTGATCGG |
| TCF7L2 | 1700 | -GGGATTCTGGGCGA-GTTTTAGAGCTA- |
| | | CCGATCAATGCGGTCTGCGTAAC- |
| | | TTTTTTTTcagccaactccaaTTTTTTTT- |
| | | GTTACGCAGACCGCATTGATCGG |
| TCF7L2 | 1701 | g-ATCCTTTCGGGCGC-GTTTTAGAGCTA- |
| | | CCCTTACTCGCGATACTCTCGAC- |
| | | TTTTTTTTcagccaactccaaTTTTTTTT- |
| | | GTCGAGAGTATCGCGAGTAAGGG |
| TCF7L2 | 1702 | g-ATGCACACGTCACT-GTTTTAGAGCTA- |
| | | CCCTTACTCGCGATACTCTCGAC- |
| | | TTTTTTTTcagccaactccaaTTTTTTTT- |
| | | GTCGAGAGTATCGCGAGTAAGGG |
| TCF7L2 | 1703 | -GAACGGAGTAGTCT-GTTTTAGAGCTA- |
| | | CCCTTACTCGCGATACTCTCGAC- |
| | | TTTTTTTTcagccaactccaaTTTTTTTT- |
| | | GTCGAGAGTATCGCGAGTAAGGG |
| TCF7L2 | 1704 | -GGGATTCTGGGCGA-GTTTTAGAGCTA- |
| | | CCCTTACTCGCGATACTCTCGAC- |
| | | TTTTTTTTcagccaactccaaTTTTTTTT- |
| | | GTCGAGAGTATCGCGAGTAAGGG |
| TCF7L2 | 1705 | g-ATCCTTTCGGGCGC-GTTTTAGAGCTA- |
| | | CCGCGGACGGTAAGCACGGAATA- |
| | | TTTTTTTTcagccaactccaaTTTTTTTT- |
| | | TATTCCGTGCTTACCGTCCGCGG |
| TCF7L2 | 1706 | g-ATGCACACGTCACT-GTTTTAGAGCTA- |
| | | CCGCGGACGGTAAGCACGGAATA- |
| | | TTTTTTTTcagccaactccaaTTTTTTTT- |
| | | TATTCCGTGCTTACCGTCCGCGG |
| TCF7L2 | 1707 | -GAACGGAGTAGTCT-GTTTTAGAGCTA- |
| | | CCGCGGACGGTAAGCACGGAATA- |
| | | TTTTTTTTcagccaactccaaTTTTTTTT- |
| | | TATTCCGTGCTTACCGTCCGCGG |
| TCF7L2 | 1708 | -GGGATTCTGGGCGA-GTTTTAGAGCTA- |
| | | CCGCGGACGGTAAGCACGGAATA- |
| | | TTTTTTTTcagccaactccaaTTTTTTTT- |
| | | TATTCCGTGCTTACCGTCCGCGG |
| TCF7L2 | 1709 | g-ATCCTTTCGGGCGC-GTTTTAGAGCTA- |
| | | CCTATAGTCACGAATCGTAGGGT- |
| | | TTTTTTTTcagccaactccaaTTTTTTTT- |
| | | ACCCTACGATTCGTGACTATAGG |
| TCF7L2 | 1710 | g-ATGCACACGTCACT-GTTTTAGAGCTA- |
| | | CCTATAGTCACGAATCGTAGGGT- |
| | | TTTTTTTTcagccaactccaaTTTTTTTT- |
| | | ACCCTACGATTCGTGACTATAGG |
| TCF7L2 | 1711 | -GAACGGAGTAGTCT-GTTTTAGAGCTA- |
| | | CCTATAGTCACGAATCGTAGGGT- |
| | | TTTTTTTTcagccaactccaaTTTTTTTT- |
| | | ACCCTACGATTCGTGACTATAGG |
| TCF7L2 | 1712 | -GGGATTCTGGGCGA-GTTTTAGAGCTA- |
| | | CCTATAGTCACGAATCGTAGGGT- |
| | | TTTTTTTTcagccaactccaaTTTTTTTT- |
| | | ACCCTACGATTCGTGACTATAGG |
| TCF7L2 | 1713 | g-ATCCTTTCGGGCGC-GTTTTAGAGCTA- |
| | | CCCGTCGTCACGTATGCGTAGCA- |
| | | TTTTTTTTcagccaactccaaTTTTTTTT- |
| | | TGCTACGCATACGTGACGACGGG |
| TCF7L2 | 1714 | g-ATGCACACGTCACT-GTTTTAGAGCTA- |
| | | CCCGTCGTCACGTATGCGTAGCA- |
| | | TTTTTTTTcagccaactccaaTTTTTTTT- |
| | | TGCTACGCATACGTGACGACGGG |
| TCF7L2 | 1715 | -GAACGGAGTAGTCT-GTTTTAGAGCTA- |
| | | CCCGTCGTCACGTATGCGTAGCA- |
| | | TTTTTTTTcagccaactccaaTTTTTTTT- |
| | | TGCTACGCATACGTGACGACGGG |
| TCF7L2 | 1716 | -GGGATTCTGGGCGA-GTTTTAGAGCTA- |
| | | CCCGTCGTCACGTATGCGTAGCA- |
| | | TTTTTTTTcagccaactccaaTTTTTTTT- |
| | | TGCTACGCATACGTGACGACGGG |
| TCF7L2 | 1717 | g-ATCCTTTCGGGCGC-GTTTTAGAGCTA- |
| | | CCCGAGAGGTAGTAGACGACGCA- |
| | | TTTTTTTTcagccaactccaaTTTTTTTT- |
| | | TGCGTCGTCTACTACCTCTCGGG |
| TCF7L2 | 1718 | g-ATGCACACGTCACT-GTTTTAGAGCTA- |
| | | CCCGAGAGGTAGTAGACGACGCA- |
| | | TTTTTTTTcagccaactccaaTTTTTTTT- |
| | | TGCGTCGTCTACTACCTCTCGGG |
| TCF7L2 | 1719 | -GAACGGAGTAGTCT-GTTTTAGAGCTA- |
| | | CCCGAGAGGTAGTAGACGACGCA- |
| | | TTTTTTTTcagccaactccaaTTTTTTTT- |
| | | TGCGTCGTCTACTACCTCTCGGG |
| TCF7L2 | 1720 | -GGGATTCTGGGCGA-GTTTTAGAGCTA- |
| | | CCCGAGAGGTAGTAGACGACGCA- |
| | | TTTTTTTTcagccaactccaaTTTTTTTT- |
| | | TGCGTCGTCTACTACCTCTCGGG |
| TCF7L2 | 1721 | g-ATCCTTTCGGGCGC-GTTTTAGAGCTA- |
| | | CCGACGTCTACGGACGGGAGCTA- |
| | | TTTTTTTTcagccaactccaaTTTTTTTT- |
| | | TAGCTCCCGTCCGTAGACGTCGG |
| TCF7L2 | 1722 | g-ATGCACACGTCACT-GTTTTAGAGCTA- |
| | | CCGACGTCTACGGACGGGAGCTA- |
| | | TTTTTTTTcagccaactccaaTTTTTTTT- |
| | | TAGCTCCCGTCCGTAGACGTCGG |
| TCF7L2 | 1723 | -GAACGGAGTAGTCT-GTTTTAGAGCTA- |
| | | CCGACGTCTACGGACGGGAGCTA- |
| | | TTTTTTTTcagccaactccaaTTTTTTTT- |
| | | TAGCTCCCGTCCGTAGACGTCGG |
| TCF7L2 | 1724 | -GGGATTCTGGGCGA-GTTTTAGAGCTA- |
| | | CCGACGTCTACGGACGGGAGCTA- |
| | | TTTTTTTTcagccaactccaaTTTTTTTT- |
| | | TAGCTCCCGTCCGTAGACGTCGG |
| TCF7L2 | 1725 | g-ATCCTTTCGGGCGC-GTTTTAGAGCTA- |
| | | CCAAAGCTCATTCGCGACTGAGC- |
| | | TTTTTTTTcagccaactccaaTTTTTTTT- |
| | | GCTCAGTCGCGAATGAGCTTTGG |
| TCF7L2 | 1726 | g-ATGCACACGTCACT-GTTTTAGAGCTA- |
| | | CCAAAGCTCATTCGCGACTGAGC- |
| | | TTTTTTTTcagccaactccaaTTTTTTTT- |
| | | GCTCAGTCGCGAATGAGCTTTGG |
| TCF7L2 | 1727 | -GAACGGAGTAGTCT-GTTTTAGAGCTA- |
| | | CCAAAGCTCATTCGCGACTGAGC- |
| | | TTTTTTTTcagccaactccaaTTTTTTTT- |
| | | GCTCAGTCGCGAATGAGCTTTGG |
| TCF7L2 | 1728 | -GGGATTCTGGGCGA-GTTTTAGAGCTA- |
| | | CCAAAGCTCATTCGCGACTGAGC- |
| | | TTTTTTTTcagccaactccaaTTTTTTTT- |
| | | GCTCAGTCGCGAATGAGCTTTGG |
| TCF7L2 | 1729 | g-ATCCTTTCGGGCGC-GTTTTAGAGCTA- |
| | | CCATGGCACGATCGACACGGAGG- |
| | | TTTTTTTTcagccaactccaaTTTTTTTT- |
| | | CCTCCGTGTCGATCGTGCCATGG |
| TCF7L2 | 1730 | g-ATGCACACGTCACT-GTTTTAGAGCTA- |
| | | CCATGGCACGATCGACACGGAGG- |
| | | TTTTTTTTcagccaactccaaTTTTTTTT- |
| | | CCTCCGTGTCGATCGTGCCATGG |
| TCF7L2 | 1731 | -GAACGGAGTAGTCT-GTTTTAGAGCTA- |
| | | CCATGGCACGATCGACACGGAGG- |
| | | TTTTTTTTcagccaactccaaTTTTTTTT- |
| | | CCTCCGTGTCGATCGTGCCATGG |
| TCF7L2 | 1732 | -GGGATTCTGGGCGA-GTTTTAGAGCTA- |
| | | CCATGGCACGATCGACACGGAGG- |
| | | TTTTTTTTcagccaactccaaTTTTTTTT- |
| | | CCTCCGTGTCGATCGTGCCATGG |
| TCF7L2 | 1733 | g-ATCCTTTCGGGCGC-GTTTTAGAGCTA- |
| | | CCCGAACTCTCTATCGAACGAGT- |
| | | TTTTTTTTcagccaactccaaTTTTTTTT- |
| | | ACTCGTTCGATAGAGAGTTCGGG |
| TCF7L2 | 1734 | g-ATGCACACGTCACT-GTTTTAGAGCTA- |
| | | CCCGAACTCTCTATCGAACGAGT- |
| | | TTTTTTTTcagccaactccaaTTTTTTTT- |
| | | ACTCGTTCGATAGAGAGTTCGGG |
| TCF7L2 | 1735 | -GAACGGAGTAGTCT-GTTTTAGAGCTA- |
| | | CCCGAACTCTCTATCGAACGAGT- |
| | | TTTTTTTTcagccaactccaaTTTTTTTT- |
| | | ACTCGTTCGATAGAGAGTTCGGG |
| TCF7L2 | 1736 | -GGGATTCTGGGCGA-GTTTTAGAGCTA- |
| | | CCCGAACTCTCTATCGAACGAGT- |
| | | TTTTTTTTcagccaactccaaTTTTTTTT- |
| | | ACTCGTTCGATAGAGAGTTCGGG |
| TCF7L2 | 1737 | g-ATCCTTTCGGGCGC-GTTTTAGAGCTA- |
| | | CCTACACGATAGTGGTCGTGCGC- |
| | | TTTTTTTTcagccaactccaaTTTTTTTT- |
| | | GCGCACGACCACTATCGTGTAGG |
| TCF7L2 | 1738 | g-ATGCACACGTCACT-GTTTTAGAGCTA- |
| | | CCTACACGATAGTGGTCGTGCGC- |
| | | TTTTTTTTcagccaactccaaTTTTTTTT- |
| | | GCGCACGACCACTATCGTGTAGG |
| TCF7L2 | 1739 | -GAACGGAGTAGTCT-GTTTTAGAGCTA- |
| | | CCTACACGATAGTGGTCGTGCGC- |
| | | TTTTTTTTcagccaactccaaTTTTTTTT- |
| | | GCGCACGACCACTATCGTGTAGG |
| TCF7L2 | 1740 | -GGGATTCTGGGCGA-GTTTTAGAGCTA- |
| | | CCTACACGATAGTGGTCGTGCGC- |
| | | TTTTTTTTcagccaactccaaTTTTTTTT- |
| | | GCGCACGACCACTATCGTGTAGG |
| TCF7L2 | 1741 | g-ATCCTTTCGGGCGC-GTTTTAGAGCTA- |
| | | CCCTGGCGGAACGTTCGAGTAAT- |
| | | TTTTTTTTcagccaactccaaTTTTTTTT- |
| | | ATTACTCGAACGTTCCGCCAGGG |
| TCF7L2 | 1742 | g-ATGCACACGTCACT-GTTTTAGAGCTA- |
| | | CCCTGGCGGAACGTTCGAGTAAT- |
| | | TTTTTTTTcagccaactccaaTTTTTTTT- |
| | | ATTACTCGAACGTTCCGCCAGGG |
| TCF7L2 | 1743 | -GAACGGAGTAGTCT-GTTTTAGAGCTA- |
| | | CCCTGGCGGAACGTTCGAGTAAT- |
| | | TTTTTTTTcagccaactccaaTTTTTTTT- |
| | | ATTACTCGAACGTTCCGCCAGGG |
| TCF7L2 | 1744 | -GGGATTCTGGGCGA-GTTTTAGAGCTA- |
| | | CCCTGGCGGAACGTTCGAGTAAT- |
| | | TTTTTTTTcagccaactccaaTTTTTTTT- |
| | | ATTACTCGAACGTTCCGCCAGGG |
| TCF7L2 | 1745 | g-ATCCTTTCGGGCGC-GTTTTAGAGCTA- |
| | | CCTACACTCGACATCGGTAGCTA- |
| | | TTTTTTTTcagccaactccaaTTTTTTTT- |
| | | TAGCTACCGATGTCGAGTGTAGG |
| TCF7L2 | 1746 | g-ATGCACACGTCACT-GTTTTAGAGCTA- |
| | | CCTACACTCGACATCGGTAGCTA- |
| | | TTTTTTTTcagccaactccaaTTTTTTTT- |
| | | TAGCTACCGATGTCGAGTGTAGG |
| TCF7L2 | 1747 | -GAACGGAGTAGTCT-GTTTTAGAGCTA- |
| | | CCTACACTCGACATCGGTAGCTA- |
| | | TTTTTTTTcagccaactccaaTTTTTTTT- |
| | | TAGCTACCGATGTCGAGTGTAGG |
| TCF7L2 | 1748 | -GGGATTCTGGGCGA-GTTTTAGAGCTA- |
| | | CCTACACTCGACATCGGTAGCTA- |
| | | TTTTTTTTcagccaactccaaTTTTTTTT- |
| | | TAGCTACCGATGTCGAGTGTAGG |
| TWIST1 | 1749 | g-ACCCCGAGGAAGGG-GTTTTAGAGCTA- |
| | | CCGTCGTTGTACCGTCTACTTGAC- |
| | | TTTTTTTTcagccaactccaaTTTTTTTT- |
| | | GTCAAGTAGACGGTACAACGACGG |
| TWIST1 | 1750 | -GCGCTAGGGTTCGG-GTTTTAGAGCTA- |
| | | CCGTCGTTGTACCGTCTACTTGAC- |
| | | TTTTTTTTcagccaactccaaTTTTTTTT- |
| | | GTCAAGTAGACGGTACAACGACGG |
| TWIST1 | 1751 | g-AGCCCCATCCGGAG-GTTTTAGAGCTA- |
| | | CCGTCGTTGTACCGTCTACTTGAC- |
| | | TTTTTTTTcagccaactccaaTTTTTTTT- |
| | | GTCAAGTAGACGGTACAACGACGG |
| TWIST1 | 1752 | -GGCCTGACGTGAGG-GTTTTAGAGCTA- |
| | | CCGTCGTTGTACCGTCTACTTGAC- |
| | | TTTTTTTTcagccaactccaaTTTTTTTT- |
| | | GTCAAGTAGACGGTACAACGACGG |
| TWIST1 | 1753 | g-ACCCCGAGGAAGGG-GTTTTAGAGCTA- |
| | | CCTTCCCGACTTCCGTAGGAGCGC- |
| | | TTTTTTTTcagccaactccaaTTTTTTTT- |
| | | GCGCTCCTACGGAAGTCGGGAAGG |
| TWIST1 | 1754 | -GCGCTAGGGTTCGG-GTTTTAGAGCTA- |
| | | CCTTCCCGACTTCCGTAGGAGCGC- |
| | | TTTTTTTTcagccaactccaaTTTTTTTT- |
| | | GCGCTCCTACGGAAGTCGGGAAGG |
| TWIST1 | 1755 | g-AGCCCCATCCGGAG-GTTTTAGAGCTA- |
| | | CCTTCCCGACTTCCGTAGGAGCGC- |
| | | TTTTTTTTcagccaactccaaTTTTTTTT- |
| | | GCGCTCCTACGGAAGTCGGGAAGG |
| TWIST1 | 1756 | -GGCCTGACGTGAGG-GTTTTAGAGCTA- |
| | | CCTTCCCGACTTCCGTAGGAGCGC- |
| | | TTTTTTTTcagccaactccaaTTTTTTTT- |
| | | GCGCTCCTACGGAAGTCGGGAAGG |
| TWIST1 | 1757 | g-ACCCCGAGGAAGGG-GTTTTAGAGCTA- |
| | | CCTGAAGGTAAAGATCGGGTCCTC- |
| | | TTTTTTTTcagccaactccaaTTTTTTTT- |
| | | GAGGACCCGATCTTTACCTTCAGG |
| TWIST1 | 1758 | -GCGCTAGGGTTCGG-GTTTTAGAGCTA- |
| | | CCTGAAGGTAAAGATCGGGTCCTC- |
| | | TTTTTTTTcagccaactccaaTTTTTTTT- |
| | | GAGGACCCGATCTTTACCTTCAGG |
| TWIST1 | 1759 | g-AGCCCCATCCGGAG-GTTTTAGAGCTA- |
| | | CCTGAAGGTAAAGATCGGGTCCTC- |
| | | TTTTTTTTcagccaactccaaTTTTTTTT- |
| | | GAGGACCCGATCTTTACCTTCAGG |
| TWIST1 | 1760 | -GGCCTGACGTGAGG-GTTTTAGAGCTA- |
| | | CCTGAAGGTAAAGATCGGGTCCTC- |
| | | TTTTTTTTcagccaactccaaTTTTTTTT- |
| | | GAGGACCCGATCTTTACCTTCAGG |
| TWIST1 | 1761 | g-ACCCCGAGGAAGGG-GTTTTAGAGCTA- |
| | | CCTGGTTATAGCGGACGCACTGT- |
| | | TTTTTTTTcagccaactccaaTTTTTTTT- |
| | | ACAGTGCGTCCGCTATAACCAGG |
| TWIST1 | 1762 | -GCGCTAGGGTTCGG-GTTTTAGAGCTA- |
| | | CCTGGTTATAGCGGACGCACTGT- |
| | | TTTTTTTTcagccaactccaaTTTTTTTT- |
| | | ACAGTGCGTCCGCTATAACCAGG |
| TWIST1 | 1763 | g-AGCCCCATCCGGAG-GTTTTAGAGCTA- |
| | | CCTGGTTATAGCGGACGCACTGT- |
| | | TTTTTTTTcagccaactccaaTTTTTTTT- |
| | | ACAGTGCGTCCGCTATAACCAGG |
| TWIST1 | 1764 | -GGCCTGACGTGAGG-GTTTTAGAGCTA- |
| | | CCTGGTTATAGCGGACGCACTGT- |
| | | TTTTTTTTcagccaactccaaTTTTTTTT- |
| | | ACAGTGCGTCCGCTATAACCAGG |
| TWIST1 | 1765 | g-ACCCCGAGGAAGGG-GTTTTAGAGCTA- |
| | | CCGCATCGTATTATCTGCGAAGC- |
| | | TTTTTTTTcagccaactccaaTTTTTTTT- |
| | | GCTTCGCAGATAATACGATGCGG |
| TWIST1 | 1766 | -GCGCTAGGGTTCGG-GTTTTAGAGCTA- |
| | | CCGCATCGTATTATCTGCGAAGC- |
| | | TTTTTTTTcagccaactccaaTTTTTTTT- |
| | | GCTTCGCAGATAATACGATGCGG |
| TWIST1 | 1767 | g-AGCCCCATCCGGAG-GTTTTAGAGCTA- |
| | | CCGCATCGTATTATCTGCGAAGC- |
| | | TTTTTTTTcagccaactccaaTTTTTTTT- |
| | | GCTTCGCAGATAATACGATGCGG |
| TWIST1 | 1768 | -GGCCTGACGTGAGG-GTTTTAGAGCTA- |
| | | CCGCATCGTATTATCTGCGAAGC- |
| | | TTTTTTTTcagccaactccaaTTTTTTTT- |
| | | GCTTCGCAGATAATACGATGCGG |
| TWIST1 | 1769 | g-ACCCCGAGGAAGGG-GTTTTAGAGCTA- |
| | | CCGCTAGGACGTTCAACGGAGTC- |
| | | TTTTTTTTcagccaactccaaTTTTTTTT- |
| | | GACTCCGTTGAACGTCCTAGCGG |
| TWIST1 | 1770 | -GCGCTAGGGTTCGG-GTTTTAGAGCTA- |
| | | CCGCTAGGACGTTCAACGGAGTC- |
| | | TTTTTTTTcagccaactccaaTTTTTTTT- |
| | | GACTCCGTTGAACGTCCTAGCGG |
| TWIST1 | 1771 | g-AGCCCCATCCGGAG-GTTTTAGAGCTA- |
| | | CCGCTAGGACGTTCAACGGAGTC- |
| | | TTTTTTTTcagccaactccaaTTTTTTTT- |
| | | GACTCCGTTGAACGTCCTAGCGG |
| TWIST1 | 1772 | -GGCCTGACGTGAGG-GTTTTAGAGCTA- |
| | | CCGCTAGGACGTTCAACGGAGTC- |
| | | TTTTTTTTcagccaactccaaTTTTTTTT- |
| | | GACTCCGTTGAACGTCCTAGCGG |
| TWIST1 | 1773 | g-ACCCCGAGGAAGGG-GTTTTAGAGCTA- |
| | | CCATAGCGGTACTATCGGCATCT- |
| | | TTTTTTTTcagccaactccaaTTTTTTTT- |
| | | AGATGCCGATAGTACCGCTATGG |
| TWIST1 | 1774 | -GCGCTAGGGTTCGG-GTTTTAGAGCTA- |
| | | CCATAGCGGTACTATCGGCATCT- |
| | | TTTTTTTTcagccaactccaaTTTTTTTT- |
| | | AGATGCCGATAGTACCGCTATGG |
| TWIST1 | 1775 | g-AGCCCCATCCGGAG-GTTTTAGAGCTA- |
| | | CCATAGCGGTACTATCGGCATCT- |
| | | TTTTTTTTcagccaactccaaTTTTTTTT- |
| | | AGATGCCGATAGTACCGCTATGG |
| TWIST1 | 1776 | -GGCCTGACGTGAGG-GTTTTAGAGCTA- |
| | | CCATAGCGGTACTATCGGCATCT- |
| | | TTTTTTTTcagccaactccaaTTTTTTTT- |
| | | AGATGCCGATAGTACCGCTATGG |
| TWIST1 | 1777 | g-ACCCCGAGGAAGGG-GTTTTAGAGCTA- |
| | | CCTCGTACTAGTCTCGCATGACC- |
| | | TTTTTTTTcagccaactccaaTTTTTTTT- |
| | | GGTCATGCGAGACTAGTACGAGG |
| TWIST1 | 1778 | -GCGCTAGGGTTCGG-GTTTTAGAGCTA- |
| | | CCTCGTACTAGTCTCGCATGACC- |
| | | TTTTTTTTcagccaactccaaTTTTTTTT- |
| | | GGTCATGCGAGACTAGTACGAGG |
| TWIST1 | 1779 | g-AGCCCCATCCGGAG-GTTTTAGAGCTA- |
| | | CCTCGTACTAGTCTCGCATGACC- |
| | | TTTTTTTTcagccaactccaaTTTTTTTT- |
| | | GGTCATGCGAGACTAGTACGAGG |
| TWIST1 | 1780 | -GGCCTGACGTGAGG-GTTTTAGAGCTA- |
| | | CCTCGTACTAGTCTCGCATGACC- |
| | | TTTTTTTTcagccaactccaaTTTTTTTT- |
| | | GGTCATGCGAGACTAGTACGAGG |
| TWIST1 | 1781 | g-ACCCCGAGGAAGGG-GTTTTAGAGCTA- |
| | | CCGATAGTGCTAAACGACGCTTT- |
| | | TTTTTTTTcagccaactccaaTTTTTTTT- |
| | | AAAGCGTCGTTTAGCACTATCGG |
| TWIST1 | 1782 | -GCGCTAGGGTTCGG-GTTTTAGAGCTA- |
| | | CCGATAGTGCTAAACGACGCTTT- |
| | | TTTTTTTTcagccaactccaaTTTTTTTT- |
| | | AAAGCGTCGTTTAGCACTATCGG |
| TWIST1 | 1783 | g-AGCCCCATCCGGAG-GTTTTAGAGCTA- |
| | | CCGATAGTGCTAAACGACGCTTT- |
| | | TTTTTTTTcagccaactccaaTTTTTTTT- |
| | | AAAGCGTCGTTTAGCACTATCGG |
| TWIST1 | 1784 | -GGCCTGACGTGAGG-GTTTTAGAGCTA- |
| | | CCGATAGTGCTAAACGACGCTTT- |
| | | TTTTTTTTcagccaactccaaTTTTTTTT- |
| | | AAAGCGTCGTTTAGCACTATCGG |
| TWIST1 | 1785 | g-ACCCCGAGGAAGGG-GTTTTAGAGCTA- |
| | | CCCGTTATCGACGTTCAAGGAAC- |
| | | TTTTTTTTcagccaactccaaTTTTTTTT- |
| | | GTTCCTTGAACGTCGATAACGGG |
| TWIST1 | 1786 | -GCGCTAGGGTTCGG-GTTTTAGAGCTA- |
| | | CCCGTTATCGACGTTCAAGGAAC- |
| | | TTTTTTTTcagccaactccaaTTTTTTTT- |
| | | GTTCCTTGAACGTCGATAACGGG |
| TWIST1 | 1787 | g-AGCCCCATCCGGAG-GTTTTAGAGCTA- |
| | | CCCGTTATCGACGTTCAAGGAAC- |
| | | TTTTTTTTcagccaactccaaTTTTTTTT- |
| | | GTTCCTTGAACGTCGATAACGGG |
| TWIST1 | 1788 | -GGCCTGACGTGAGG-GTTTTAGAGCTA- |
| | | CCCGTTATCGACGTTCAAGGAAC- |
| | | TTTTTTTTcagccaactccaaTTTTTTTT- |
| | | GTTCCTTGAACGTCGATAACGGG |
| TWIST1 | 1789 | g-ACCCCGAGGAAGGG-GTTTTAGAGCTA- |
| | | CCGATCAATGCGGTCTGCGTAAC- |
| | | TTTTTTTTcagccaactccaaTTTTTTTT- |
| | | GTTACGCAGACCGCATTGATCGG |
| TWIST1 | 1790 | -GCGCTAGGGTTCGG-GTTTTAGAGCTA- |
| | | CCGATCAATGCGGTCTGCGTAAC- |
| | | TTTTTTTTcagccaactccaaTTTTTTTT- |
| | | GTTACGCAGACCGCATTGATCGG |
| TWIST1 | 1791 | g-AGCCCCATCCGGAG-GTTTTAGAGCTA- |
| | | CCGATCAATGCGGTCTGCGTAAC- |
| | | TTTTTTTTcagccaactccaaTTTTTTTT- |
| | | GTTACGCAGACCGCATTGATCGG |
| TWIST1 | 1792 | -GGCCTGACGTGAGG-GTTTTAGAGCTA- |
| | | CCGATCAATGCGGTCTGCGTAAC- |
| | | TTTTTTTTcagccaactccaaTTTTTTTT- |
| | | GTTACGCAGACCGCATTGATCGG |
| TWIST1 | 1793 | g-ACCCCGAGGAAGGG-GTTTTAGAGCTA- |
| | | CCCTTACTCGCGATACTCTCGAC- |
| | | TTTTTTTTcagccaactccaaTTTTTTTT- |
| | | GTCGAGAGTATCGCGAGTAAGGG |
| TWIST1 | 1794 | -GCGCTAGGGTTCGG-GTTTTAGAGCTA- |
| | | CCCTTACTCGCGATACTCTCGAC- |
| | | TTTTTTTTcagccaactccaaTTTTTTTT- |
| | | GTCGAGAGTATCGCGAGTAAGGG |
| TWIST1 | 1795 | g-AGCCCCATCCGGAG-GTTTTAGAGCTA- |
| | | CCCTTACTCGCGATACTCTCGAC- |
| | | TTTTTTTTcagccaactccaaTTTTTTTT- |
| | | GTCGAGAGTATCGCGAGTAAGGG |
| TWIST1 | 1796 | -GGCCTGACGTGAGG-GTTTTAGAGCTA- |
| | | CCCTTACTCGCGATACTCTCGAC- |
| | | TTTTTTTTcagccaactccaaTTTTTTTT- |
| | | GTCGAGAGTATCGCGAGTAAGGG |
| TWIST1 | 1797 | g-ACCCCGAGGAAGGG-GTTTTAGAGCTA- |
| | | CCGCGGACGGTAAGCACGGAATA- |
| | | TTTTTTTTcagccaactccaaTTTTTTTT- |
| | | TATTCCGTGCTTACCGTCCGCGG |
| TWIST1 | 1798 | -GCGCTAGGGTTCGG-GTTTTAGAGCTA- |
| | | CCGCGGACGGTAAGCACGGAATA- |
| | | TTTTTTTTcagccaactccaaTTTTTTTT- |
| | | TATTCCGTGCTTACCGTCCGCGG |
| TWIST1 | 1799 | g-AGCCCCATCCGGAG-GTTTTAGAGCTA- |
| | | CCGCGGACGGTAAGCACGGAATA- |
| | | TTTTTTTTcagccaactccaaTTTTTTTT- |
| | | TATTCCGTGCTTACCGTCCGCGG |
| TWIST1 | 1800 | -GGCCTGACGTGAGG-GTTTTAGAGCTA- |
| | | CCGCGGACGGTAAGCACGGAATA- |
| | | TTTTTTTTcagccaactccaaTTTTTTTT- |
| | | TATTCCGTGCTTACCGTCCGCGG |
| TWIST1 | 1801 | g-ACCCCGAGGAAGGG-GTTTTAGAGCTA- |
| | | CCTATAGTCACGAATCGTAGGGT- |
| | | TTTTTTTTcagccaactccaaTTTTTTTT- |
| | | ACCCTACGATTCGTGACTATAGG |
| TWIST1 | 1802 | -GCGCTAGGGTTCGG-GTTTTAGAGCTA- |
| | | CCTATAGTCACGAATCGTAGGGT- |
| | | TTTTTTTTcagccaactccaaTTTTTTTT- |
| | | ACCCTACGATTCGTGACTATAGG |
| TWIST1 | 1803 | g-AGCCCCATCCGGAG-GTTTTAGAGCTA- |
| | | CCTATAGTCACGAATCGTAGGGT- |
| | | TTTTTTTTcagccaactccaaTTTTTTTT- |
| | | ACCCTACGATTCGTGACTATAGG |
| TWIST1 | 1804 | -GGCCTGACGTGAGG-GTTTTAGAGCTA- |
| | | CCTATAGTCACGAATCGTAGGGT- |
| | | TTTTTTTTcagccaactccaaTTTTTTTT- |
| | | ACCCTACGATTCGTGACTATAGG |
| TWIST1 | 1805 | g-ACCCCGAGGAAGGG-GTTTTAGAGCTA- |
| | | CCCGTCGTCACGTATGCGTAGCA- |
| | | TTTTTTTTcagccaactccaaTTTTTTTT- |
| | | TGCTACGCATACGTGACGACGGG |
| TWIST1 | 1806 | -GCGCTAGGGTTCGG-GTTTTAGAGCTA- |
| | | CCCGTCGTCACGTATGCGTAGCA- |
| | | TTTTTTTTcagccaactccaaTTTTTTTT- |
| | | TGCTACGCATACGTGACGACGGG |
| TWIST1 | 1807 | g-AGCCCCATCCGGAG-GTTTTAGAGCTA- |
| | | CCCGTCGTCACGTATGCGTAGCA- |
| | | TTTTTTTTcagccaactccaaTTTTTTTT- |
| | | TGCTACGCATACGTGACGACGGG |
| TWIST1 | 1808 | -GGCCTGACGTGAGG-GTTTTAGAGCTA- |
| | | CCCGTCGTCACGTATGCGTAGCA- |
| | | TTTTTTTTcagccaactccaaTTTTTTTT- |
| | | TGCTACGCATACGTGACGACGGG |
| TWIST1 | 1809 | g-ACCCCGAGGAAGGG-GTTTTAGAGCTA- |
| | | CCCGAGAGGTAGTAGACGACGCA- |
| | | TTTTTTTTcagccaactccaaTTTTTTTT- |
| | | TGCGTCGTCTACTACCTCTCGGG |
| TWIST1 | 1810 | -GCGCTAGGGTTCGG-GTTTTAGAGCTA- |
| | | CCCGAGAGGTAGTAGACGACGCA- |
| | | TTTTTTTTcagccaactccaaTTTTTTTT- |
| | | TGCGTCGTCTACTACCTCTCGGG |
| TWIST1 | 1811 | g-AGCCCCATCCGGAG-GTTTTAGAGCTA- |
| | | CCCGAGAGGTAGTAGACGACGCA- |
| | | TTTTTTTTcagccaactccaaTTTTTTTT- |
| | | TGCGTCGTCTACTACCTCTCGGG |
| TWIST1 | 1812 | -GGCCTGACGTGAGG-GTTTTAGAGCTA- |
| | | CCCGAGAGGTAGTAGACGACGCA- |
| | | TTTTTTTTcagccaactccaaTTTTTTTT- |
| | | TGCGTCGTCTACTACCTCTCGGG |
| TWIST1 | 1813 | g-ACCCCGAGGAAGGG-GTTTTAGAGCTA- |
| | | CCGACGTCTACGGACGGGAGCTA- |
| | | TTTTTTTTcagccaactccaaTTTTTTTT- |
| | | TAGCTCCCGTCCGTAGACGTCGG |
| TWIST1 | 1814 | -GCGCTAGGGTTCGG-GTTTTAGAGCTA- |
| | | CCGACGTCTACGGACGGGAGCTA- |
| | | TTTTTTTTcagccaactccaaTTTTTTTT- |
| | | TAGCTCCCGTCCGTAGACGTCGG |
| TWIST1 | 1815 | g-AGCCCCATCCGGAG-GTTTTAGAGCTA- |
| | | CCGACGTCTACGGACGGGAGCTA- |
| | | TTTTTTTTcagccaactccaaTTTTTTTT- |
| | | TAGCTCCCGTCCGTAGACGTCGG |
| TWIST1 | 1816 | -GGCCTGACGTGAGG-GTTTTAGAGCTA- |
| | | CCGACGTCTACGGACGGGAGCTA- |
| | | TTTTTTTTcagccaactccaaTTTTTTTT- |
| | | TAGCTCCCGTCCGTAGACGTCGG |
| TWIST1 | 1817 | g-ACCCCGAGGAAGGG-GTTTTAGAGCTA- |
| | | CCAAAGCTCATTCGCGACTGAGC- |
| | | TTTTTTTTcagccaactccaaTTTTTTTT- |
| | | GCTCAGTCGCGAATGAGCTTTGG |
| TWIST1 | 1818 | -GCGCTAGGGTTCGG-GTTTTAGAGCTA- |
| | | CCAAAGCTCATTCGCGACTGAGC- |
| | | TTTTTTTTcagccaactccaaTTTTTTTT- |
| | | GCTCAGTCGCGAATGAGCTTTGG |
| TWIST1 | 1819 | g-AGCCCCATCCGGAG-GTTTTAGAGCTA- |
| | | CCAAAGCTCATTCGCGACTGAGC- |
| | | TTTTTTTTcagccaactccaaTTTTTTTT- |
| | | GCTCAGTCGCGAATGAGCTTTGG |
| TWIST1 | 1820 | -GGCCTGACGTGAGG-GTTTTAGAGCTA- |
| | | CCAAAGCTCATTCGCGACTGAGC- |
| | | TTTTTTTTcagccaactccaaTTTTTTTT- |
| | | GCTCAGTCGCGAATGAGCTTTGG |
| TWIST1 | 1821 | g-ACCCCGAGGAAGGG-GTTTTAGAGCTA- |
| | | CCATGGCACGATCGACACGGAGG- |
| | | TTTTTTTTcagccaactccaaTTTTTTTT- |
| | | CCTCCGTGTCGATCGTGCCATGG |
| TWIST1 | 1822 | -GCGCTAGGGTTCGG-GTTTTAGAGCTA- |
| | | CCATGGCACGATCGACACGGAGG- |
| | | TTTTTTTTcagccaactccaaTTTTTTTT- |
| | | CCTCCGTGTCGATCGTGCCATGG |
| TWIST1 | 1823 | g-AGCCCCATCCGGAG-GTTTTAGAGCTA- |
| | | CCATGGCACGATCGACACGGAGG- |
| | | TTTTTTTTcagccaactccaaTTTTTTTT- |
| | | CCTCCGTGTCGATCGTGCCATGG |
| TWIST1 | 1824 | -GGCCTGACGTGAGG-GTTTTAGAGCTA- |
| | | CCATGGCACGATCGACACGGAGG- |
| | | TTTTTTTTcagccaactccaaTTTTTTTT- |
| | | CCTCCGTGTCGATCGTGCCATGG |
| TWIST1 | 1825 | g-ACCCCGAGGAAGGG-GTTTTAGAGCTA- |
| | | CCCGAACTCTCTATCGAACGAGT- |
| | | TTTTTTTTcagccaactccaaTTTTTTTT- |
| | | ACTCGTTCGATAGAGAGTTCGGG |
| TWIST1 | 1826 | -GCGCTAGGGTTCGG-GTTTTAGAGCTA- |
| | | CCCGAACTCTCTATCGAACGAGT- |
| | | TTTTTTTTcagccaactccaaTTTTTTTT- |
| | | ACTCGTTCGATAGAGAGTTCGGG |
| TWIST1 | 1827 | g-AGCCCCATCCGGAG-GTTTTAGAGCTA- |
| | | CCCGAACTCTCTATCGAACGAGT- |
| | | TTTTTTTTcagccaactccaaTTTTTTTT- |
| | | ACTCGTTCGATAGAGAGTTCGGG |
| TWIST1 | 1828 | -GGCCTGACGTGAGG-GTTTTAGAGCTA- |
| | | CCCGAACTCTCTATCGAACGAGT- |
| | | TTTTTTTTcagccaactccaaTTTTTTTT- |
| | | ACTCGTTCGATAGAGAGTTCGGG |
| TWIST1 | 1829 | g-ACCCCGAGGAAGGG-GTTTTAGAGCTA- |
| | | CCTACACGATAGTGGTCGTGCGC- |
| | | TTTTTTTTcagccaactccaaTTTTTTTT- |
| | | GCGCACGACCACTATCGTGTAGG |
| TWIST1 | 1830 | -GCGCTAGGGTTCGG-GTTTTAGAGCTA- |
| | | CCTACACGATAGTGGTCGTGCGC- |
| | | TTTTTTTTcagccaactccaaTTTTTTTT- |
| | | GCGCACGACCACTATCGTGTAGG |
| TWIST1 | 1831 | g-AGCCCCATCCGGAG-GTTTTAGAGCTA- |
| | | CCTACACGATAGTGGTCGTGCGC- |
| | | TTTTTTTTcagccaactccaaTTTTTTTT- |
| | | GCGCACGACCACTATCGTGTAGG |
| TWIST1 | 1832 | -GGCCTGACGTGAGG-GTTTTAGAGCTA- |
| | | CCTACACGATAGTGGTCGTGCGC- |
| | | TTTTTTTTcagccaactccaaTTTTTTTT- |
| | | GCGCACGACCACTATCGTGTAGG |
| TWIST1 | 1833 | g-ACCCCGAGGAAGGG-GTTTTAGAGCTA- |
| | | CCCTGGCGGAACGTTCGAGTAAT- |
| | | TTTTTTTTcagccaactccaaTTTTTTTT- |
| | | ATTACTCGAACGTTCCGCCAGGG |
| TWIST1 | 1834 | -GCGCTAGGGTTCGG-GTTTTAGAGCTA- |
| | | CCCTGGCGGAACGTTCGAGTAAT- |
| | | TTTTTTTTcagccaactccaaTTTTTTTT- |
| | | ATTACTCGAACGTTCCGCCAGGG |
| TWIST1 | 1835 | g-AGCCCCATCCGGAG-GTTTTAGAGCTA- |
| | | CCCTGGCGGAACGTTCGAGTAAT- |
| | | TTTTTTTTcagccaactccaaTTTTTTTT- |
| | | ATTACTCGAACGTTCCGCCAGGG |
| TWIST1 | 1836 | -GGCCTGACGTGAGG-GTTTTAGAGCTA- |
| | | CCCTGGCGGAACGTTCGAGTAAT- |
| | | TTTTTTTTcagccaactccaaTTTTTTTT- |
| | | ATTACTCGAACGTTCCGCCAGGG |
| TWIST1 | 1837 | g-ACCCCGAGGAAGGG-GTTTTAGAGCTA- |
| | | CCTACACTCGACATCGGTAGCTA- |
| | | TTTTTTTTcagccaactccaaTTTTTTTT- |
| | | TAGCTACCGATGTCGAGTGTAGG |
| TWIST1 | 1838 | -GCGCTAGGGTTCGG-GTTTTAGAGCTA- |
| | | CCTACACTCGACATCGGTAGCTA- |
| | | TTTTTTTTcagccaactccaaTTTTTTTT- |
| | | TAGCTACCGATGTCGAGTGTAGG |
| TWIST1 | 1839 | g-AGCCCCATCCGGAG-GTTTTAGAGCTA- |
| | | CCTACACTCGACATCGGTAGCTA- |
| | | TTTTTTTTcagccaactccaaTTTTTTTT- |
| | | TAGCTACCGATGTCGAGTGTAGG |
| TWIST1 | 1840 | -GGCCTGACGTGAGG-GTTTTAGAGCTA- |
| | | CCTACACTCGACATCGGTAGCTA- |
| | | TTTTTTTTcagccaactccaaTTTTTTTT- |
| | | TAGCTACCGATGTCGAGTGTAGG |
| UNCX | 1841 | -GCCCCGAGTGAAGT-GTTTTAGAGCTA- |
| | | CCGTCGTTGTACCGTCTACTTGAC- |
| | | TTTTTTTTcagccaactccaaTTTTTTTT- |
| | | GTCAAGTAGACGGTACAACGACGG |
| UNCX | 1842 | g-CGGCCCGGGGAATT-GTTTTAGAGCTA- |
| | | CCGTCGTTGTACCGTCTACTTGAC- |
| | | TTTTTTTTcagccaactccaaTTTTTTTT- |
| | | GTCAAGTAGACGGTACAACGACGG |
| UNCX | 1843 | g-ATTAGCAATCGATA-GTTTTAGAGCTA- |
| | | CCGTCGTTGTACCGTCTACTTGAC- |
| | | TTTTTTTTcagccaactccaaTTTTTTTT- |
| | | GTCAAGTAGACGGTACAACGACGG |
| UNCX | 1844 | g-TGTCACAACAAGAC-GTTTTAGAGCTA- |
| | | CCGTCGTTGTACCGTCTACTTGAC- |
| | | TTTTTTTTcagccaactccaaTTTTTTTT- |
| | | GTCAAGTAGACGGTACAACGACGG |
| UNCX | 1845 | -GCCCCGAGTGAAGT-GTTTTAGAGCTA- |
| | | CCTTCCCGACTTCCGTAGGAGCGC- |
| | | TTTTTTTTcagccaactccaaTTTTTTTT- |
| | | GCGCTCCTACGGAAGTCGGGAAGG |
| UNCX | 1846 | g-CGGCCCGGGGAATT-GTTTTAGAGCTA- |
| | | CCTTCCCGACTTCCGTAGGAGCGC- |
| | | TTTTTTTTcagccaactccaaTTTTTTTT- |
| | | GCGCTCCTACGGAAGTCGGGAAGG |
| UNCX | 1847 | g-ATTAGCAATCGATA-GTTTTAGAGCTA- |
| | | CCTTCCCGACTTCCGTAGGAGCGC- |
| | | TTTTTTTTcagccaactccaaTTTTTTTT- |
| | | GCGCTCCTACGGAAGTCGGGAAGG |
| UNCX | 1848 | g-TGTCACAACAAGAC-GTTTTAGAGCTA- |
| | | CCTTCCCGACTTCCGTAGGAGCGC- |
| | | TTTTTTTTcagccaactccaaTTTTTTTT- |
| | | GCGCTCCTACGGAAGTCGGGAAGG |
| UNCX | 1849 | -GCCCCGAGTGAAGT-GTTTTAGAGCTA- |
| | | CCTGAAGGTAAAGATCGGGTCCTC- |
| | | TTTTTTTTcagccaactccaaTTTTTTTT- |
| | | GAGGACCCGATCTTTACCTTCAGG |
| UNCX | 1850 | g-CGGCCCGGGGAATT-GTTTTAGAGCTA- |
| | | CCTGAAGGTAAAGATCGGGTCCTC- |
| | | TTTTTTTTcagccaactccaaTTTTTTTT- |
| | | GAGGACCCGATCTTTACCTTCAGG |
| UNCX | 1851 | g-ATTAGCAATCGATA-GTTTTAGAGCTA- |
| | | CCTGAAGGTAAAGATCGGGTCCTC- |
| | | TTTTTTTTcagccaactccaaTTTTTTTT- |
| | | GAGGACCCGATCTTTACCTTCAGG |
| UNCX | 1852 | g-TGTCACAACAAGAC-GTTTTAGAGCTA- |
| | | CCTGAAGGTAAAGATCGGGTCCTC- |
| | | TTTTTTTTcagccaactccaaTTTTTTTT- |
| | | GAGGACCCGATCTTTACCTTCAGG |
| UNCX | 1853 | -GCCCCGAGTGAAGT-GTTTTAGAGCTA- |
| | | CCTGGTTATAGCGGACGCACTGT- |
| | | TTTTTTTTcagccaactccaaTTTTTTTT- |
| | | ACAGTGCGTCCGCTATAACCAGG |
| UNCX | 1854 | g-CGGCCCGGGGAATT-GTTTTAGAGCTA- |
| | | CCTGGTTATAGCGGACGCACTGT- |
| | | TTTTTTTTcagccaactccaaTTTTTTTT- |
| | | ACAGTGCGTCCGCTATAACCAGG |
| UNCX | 1855 | g-ATTAGCAATCGATA-GTTTTAGAGCTA- |
| | | CCTGGTTATAGCGGACGCACTGT- |
| | | TTTTTTTTcagccaactccaaTTTTTTTT- |
| | | ACAGTGCGTCCGCTATAACCAGG |
| UNCX | 1856 | g-TGTCACAACAAGAC-GTTTTAGAGCTA- |
| | | CCTGGTTATAGCGGACGCACTGT- |
| | | TTTTTTTTcagccaactccaaTTTTTTTT- |
| | | ACAGTGCGTCCGCTATAACCAGG |
| UNCX | 1857 | -GCCCCGAGTGAAGT-GTTTTAGAGCTA- |
| | | CCGCATCGTATTATCTGCGAAGC- |
| | | TTTTTTTTcagccaactccaaTTTTTTTT- |
| | | GCTTCGCAGATAATACGATGCGG |
| UNCX | 1858 | g-CGGCCCGGGGAATT-GTTTTAGAGCTA- |
| | | CCGCATCGTATTATCTGCGAAGC- |
| | | TTTTTTTTcagccaactccaaTTTTTTTT- |
| | | GCTTCGCAGATAATACGATGCGG |
| UNCX | 1859 | g-ATTAGCAATCGATA-GTTTTAGAGCTA- |
| | | CCGCATCGTATTATCTGCGAAGC- |
| | | TTTTTTTTcagccaactccaaTTTTTTTT- |
| | | GCTTCGCAGATAATACGATGCGG |
| UNCX | 1860 | g-TGTCACAACAAGAC-GTTTTAGAGCTA- |
| | | CCGCATCGTATTATCTGCGAAGC- |
| | | TTTTTTTTcagccaactccaaTTTTTTTT- |
| | | GCTTCGCAGATAATACGATGCGG |
| UNCX | 1861 | -GCCCCGAGTGAAGT-GTTTTAGAGCTA- |
| | | CCGCTAGGACGTTCAACGGAGTC- |
| | | TTTTTTTTcagccaactccaaTTTTTTTT- |
| | | GACTCCGTTGAACGTCCTAGCGG |
| UNCX | 1862 | g-CGGCCCGGGGAATT-GTTTTAGAGCTA- |
| | | CCGCTAGGACGTTCAACGGAGTC- |
| | | TTTTTTTTcagccaactccaaTTTTTTTT- |
| | | GACTCCGTTGAACGTCCTAGCGG |
| UNCX | 1863 | g-ATTAGCAATCGATA-GTTTTAGAGCTA- |
| | | CCGCTAGGACGTTCAACGGAGTC- |
| | | TTTTTTTTcagccaactccaaTTTTTTTT- |
| | | GACTCCGTTGAACGTCCTAGCGG |
| UNCX | 1864 | g-TGTCACAACAAGAC-GTTTTAGAGCTA- |
| | | CCGCTAGGACGTTCAACGGAGTC- |
| | | TTTTTTTTcagccaactccaaTTTTTTTT- |
| | | GACTCCGTTGAACGTCCTAGCGG |
| UNCX | 1865 | -GCCCCGAGTGAAGT-GTTTTAGAGCTA- |
| | | CCATAGCGGTACTATCGGCATCT- |
| | | TTTTTTTTcagccaactccaaTTTTTTTT- |
| | | AGATGCCGATAGTACCGCTATGG |
| UNCX | 1866 | g-CGGCCCGGGGAATT-GTTTTAGAGCTA- |
| | | CCATAGCGGTACTATCGGCATCT- |
| | | TTTTTTTTcagccaactccaaTTTTTTTT- |
| | | AGATGCCGATAGTACCGCTATGG |
| UNCX | 1867 | g-ATTAGCAATCGATA-GTTTTAGAGCTA- |
| | | CCATAGCGGTACTATCGGCATCT- |
| | | TTTTTTTTcagccaactccaaTTTTTTTT- |
| | | AGATGCCGATAGTACCGCTATGG |
| UNCX | 1868 | g-TGTCACAACAAGAC-GTTTTAGAGCTA- |
| | | CCATAGCGGTACTATCGGCATCT- |
| | | TTTTTTTTcagccaactccaaTTTTTTTT- |
| | | AGATGCCGATAGTACCGCTATGG |
| UNCX | 1869 | -GCCCCGAGTGAAGT-GTTTTAGAGCTA- |
| | | CCTCGTACTAGTCTCGCATGACC- |
| | | TTTTTTTTcagccaactccaaTTTTTTTT- |
| | | GGTCATGCGAGACTAGTACGAGG |
| UNCX | 1870 | g-CGGCCCGGGGAATT-GTTTTAGAGCTA- |
| | | CCTCGTACTAGTCTCGCATGACC- |
| | | TTTTTTTTcagccaactccaaTTTTTTTT- |
| | | GGTCATGCGAGACTAGTACGAGG |
| UNCX | 1871 | g-ATTAGCAATCGATA-GTTTTAGAGCTA- |
| | | CCTCGTACTAGTCTCGCATGACC- |
| | | TTTTTTTTcagccaactccaaTTTTTTTT- |
| | | GGTCATGCGAGACTAGTACGAGG |
| UNCX | 1872 | g-TGTCACAACAAGAC-GTTTTAGAGCTA- |
| | | CCTCGTACTAGTCTCGCATGACC- |
| | | TTTTTTTTcagccaactccaaTTTTTTTT- |
| | | GGTCATGCGAGACTAGTACGAGG |
| UNCX | 1873 | -GCCCCGAGTGAAGT-GTTTTAGAGCTA- |
| | | CCGATAGTGCTAAACGACGCTTT- |
| | | TTTTTTTTcagccaactccaaTTTTTTTT- |
| | | AAAGCGTCGTTTAGCACTATCGG |
| UNCX | 1874 | g-CGGCCCGGGGAATT-GTTTTAGAGCTA- |
| | | CCGATAGTGCTAAACGACGCTTT- |
| | | TTTTTTTTcagccaactccaaTTTTTTTT- |
| | | AAAGCGTCGTTTAGCACTATCGG |
| UNCX | 1875 | g-ATTAGCAATCGATA-GTTTTAGAGCTA- |
| | | CCGATAGTGCTAAACGACGCTTT- |
| | | TTTTTTTTcagccaactccaaTTTTTTTT- |
| | | AAAGCGTCGTTTAGCACTATCGG |
| UNCX | 1876 | g-TGTCACAACAAGAC-GTTTTAGAGCTA- |
| | | CCGATAGTGCTAAACGACGCTTT- |
| | | TTTTTTTTcagccaactccaaTTTTTTTT- |
| | | AAAGCGTCGTTTAGCACTATCGG |
| UNCX | 1877 | -GCCCCGAGTGAAGT-GTTTTAGAGCTA- |
| | | CCCGTTATCGACGTTCAAGGAAC- |
| | | TTTTTTTTcagccaactccaaTTTTTTTT- |
| | | GTTCCTTGAACGTCGATAACGGG |
| UNCX | 1878 | g-CGGCCCGGGGAATT-GTTTTAGAGCTA- |
| | | CCCGTTATCGACGTTCAAGGAAC- |
| | | TTTTTTTTcagccaactccaaTTTTTTTT- |
| | | GTTCCTTGAACGTCGATAACGGG |
| UNCX | 1879 | g-ATTAGCAATCGATA-GTTTTAGAGCTA- |
| | | CCCGTTATCGACGTTCAAGGAAC- |
| | | TTTTTTTTcagccaactccaaTTTTTTTT- |
| | | GTTCCTTGAACGTCGATAACGGG |
| UNCX | 1880 | g-TGTCACAACAAGAC-GTTTTAGAGCTA- |
| | | CCCGTTATCGACGTTCAAGGAAC- |
| | | TTTTTTTTcagccaactccaaTTTTTTTT- |
| | | GTTCCTTGAACGTCGATAACGGG |
| UNCX | 1881 | -GCCCCGAGTGAAGT-GTTTTAGAGCTA- |
| | | CCGATCAATGCGGTCTGCGTAAC- |
| | | TTTTTTTTcagccaactccaaTTTTTTTT- |
| | | GTTACGCAGACCGCATTGATCGG |
| UNCX | 1882 | g-CGGCCCGGGGAATT-GTTTTAGAGCTA- |
| | | CCGATCAATGCGGTCTGCGTAAC- |
| | | TTTTTTTTcagccaactccaaTTTTTTTT- |
| | | GTTACGCAGACCGCATTGATCGG |
| UNCX | 1883 | g-ATTAGCAATCGATA-GTTTTAGAGCTA- |
| | | CCGATCAATGCGGTCTGCGTAAC- |
| | | TTTTTTTTcagccaactccaaTTTTTTTT- |
| | | GTTACGCAGACCGCATTGATCGG |
| UNCX | 1884 | g-TGTCACAACAAGAC-GTTTTAGAGCTA- |
| | | CCGATCAATGCGGTCTGCGTAAC- |
| | | TTTTTTTTcagccaactccaaTTTTTTTT- |
| | | GTTACGCAGACCGCATTGATCGG |
| UNCX | 1885 | -GCCCCGAGTGAAGT-GTTTTAGAGCTA- |
| | | CCCTTACTCGCGATACTCTCGAC- |
| | | TTTTTTTTcagccaactccaaTTTTTTTT- |
| | | GTCGAGAGTATCGCGAGTAAGGG |
| UNCX | 1886 | g-CGGCCCGGGGAATT-GTTTTAGAGCTA- |
| | | CCCTTACTCGCGATACTCTCGAC- |
| | | TTTTTTTTcagccaactccaaTTTTTTTT- |
| | | GTCGAGAGTATCGCGAGTAAGGG |
| UNCX | 1887 | g-ATTAGCAATCGATA-GTTTTAGAGCTA- |
| | | CCCTTACTCGCGATACTCTCGAC- |
| | | TTTTTTTTcagccaactccaaTTTTTTTT- |
| | | GTCGAGAGTATCGCGAGTAAGGG |
| UNCX | 1888 | g-TGTCACAACAAGAC-GTTTTAGAGCTA- |
| | | CCCTTACTCGCGATACTCTCGAC- |
| | | TTTTTTTTcagccaactccaaTTTTTTTT- |
| | | GTCGAGAGTATCGCGAGTAAGGG |
| UNCX | 1889 | -GCCCCGAGTGAAGT-GTTTTAGAGCTA- |
| | | CCGCGGACGGTAAGCACGGAATA- |
| | | TTTTTTTTcagccaactccaaTTTTTTTT- |
| | | TATTCCGTGCTTACCGTCCGCGG |
| UNCX | 1890 | g-CGGCCCGGGGAATT-GTTTTAGAGCTA- |
| | | CCGCGGACGGTAAGCACGGAATA- |
| | | TTTTTTTTcagccaactccaaTTTTTTTT- |
| | | TATTCCGTGCTTACCGTCCGCGG |
| UNCX | 1891 | g-ATTAGCAATCGATA-GTTTTAGAGCTA- |
| | | CCGCGGACGGTAAGCACGGAATA- |
| | | TTTTTTTTcagccaactccaaTTTTTTTT- |
| | | TATTCCGTGCTTACCGTCCGCGG |
| UNCX | 1892 | g-TGTCACAACAAGAC-GTTTTAGAGCTA- |
| | | CCGCGGACGGTAAGCACGGAATA- |
| | | TTTTTTTTcagccaactccaaTTTTTTTT- |
| | | TATTCCGTGCTTACCGTCCGCGG |
| UNCX | 1893 | -GCCCCGAGTGAAGT-GTTTTAGAGCTA- |
| | | CCTATAGTCACGAATCGTAGGGT- |
| | | TTTTTTTTcagccaactccaaTTTTTTTT- |
| | | ACCCTACGATTCGTGACTATAGG |
| UNCX | 1894 | g-CGGCCCGGGGAATT-GTTTTAGAGCTA- |
| | | CCTATAGTCACGAATCGTAGGGT- |
| | | TTTTTTTTcagccaactccaaTTTTTTTT- |
| | | ACCCTACGATTCGTGACTATAGG |
| UNCX | 1895 | g-ATTAGCAATCGATA-GTTTTAGAGCTA- |
| | | CCTATAGTCACGAATCGTAGGGT- |
| | | TTTTTTTTcagccaactccaaTTTTTTTT- |
| | | ACCCTACGATTCGTGACTATAGG |
| UNCX | 1896 | g-TGTCACAACAAGAC-GTTTTAGAGCTA- |
| | | CCTATAGTCACGAATCGTAGGGT- |
| | | TTTTTTTTcagccaactccaaTTTTTTTT- |
| | | ACCCTACGATTCGTGACTATAGG |
| UNCX | 1897 | -GCCCCGAGTGAAGT-GTTTTAGAGCTA- |
| | | CCCGTCGTCACGTATGCGTAGCA- |
| | | TTTTTTTTcagccaactccaaTTTTTTTT- |
| | | TGCTACGCATACGTGACGACGGG |
| UNCX | 1898 | g-CGGCCCGGGGAATT-GTTTTAGAGCTA- |
| | | CCCGTCGTCACGTATGCGTAGCA- |
| | | TTTTTTTTcagccaactccaaTTTTTTTT- |
| | | TGCTACGCATACGTGACGACGGG |
| UNCX | 1899 | g-ATTAGCAATCGATA-GTTTTAGAGCTA- |
| | | CCCGTCGTCACGTATGCGTAGCA- |
| | | TTTTTTTTcagccaactccaaTTTTTTTT- |
| | | TGCTACGCATACGTGACGACGGG |
| UNCX | 1900 | g-TGTCACAACAAGAC-GTTTTAGAGCTA- |
| | | CCCGTCGTCACGTATGCGTAGCA- |
| | | TTTTTTTTcagccaactccaaTTTTTTTT- |
| | | TGCTACGCATACGTGACGACGGG |
| UNCX | 1901 | -GCCCCGAGTGAAGT-GTTTTAGAGCTA- |
| | | CCCGAGAGGTAGTAGACGACGCA- |
| | | TTTTTTTTcagccaactccaaTTTTTTTT- |
| | | TGCGTCGTCTACTACCTCTCGGG |
| UNCX | 1902 | g-CGGCCCGGGGAATT-GTTTTAGAGCTA- |
| | | CCCGAGAGGTAGTAGACGACGCA- |
| | | TTTTTTTTcagccaactccaaTTTTTTTT- |
| | | TGCGTCGTCTACTACCTCTCGGG |
| UNCX | 1903 | g-ATTAGCAATCGATA-GTTTTAGAGCTA- |
| | | CCCGAGAGGTAGTAGACGACGCA- |
| | | TTTTTTTTcagccaactccaaTTTTTTTT- |
| | | TGCGTCGTCTACTACCTCTCGGG |
| UNCX | 1904 | g-TGTCACAACAAGAC-GTTTTAGAGCTA- |
| | | CCCGAGAGGTAGTAGACGACGCA- |
| | | TTTTTTTTcagccaactccaaTTTTTTTT- |
| | | TGCGTCGTCTACTACCTCTCGGG |
| UNCX | 1905 | -GCCCCGAGTGAAGT-GTTTTAGAGCTA- |
| | | CCGACGTCTACGGACGGGAGCTA- |
| | | TTTTTTTTcagccaactccaaTTTTTTTT- |
| | | TAGCTCCCGTCCGTAGACGTCGG |
| UNCX | 1906 | g-CGGCCCGGGGAATT-GTTTTAGAGCTA- |
| | | CCGACGTCTACGGACGGGAGCTA- |
| | | TTTTTTTTcagccaactccaaTTTTTTTT- |
| | | TAGCTCCCGTCCGTAGACGTCGG |
| UNCX | 1907 | g-ATTAGCAATCGATA-GTTTTAGAGCTA- |
| | | CCGACGTCTACGGACGGGAGCTA- |
| | | TTTTTTTTcagccaactccaaTTTTTTTT- |
| | | TAGCTCCCGTCCGTAGACGTCGG |
| UNCX | 1908 | g-TGTCACAACAAGAC-GTTTTAGAGCTA- |
| | | CCGACGTCTACGGACGGGAGCTA- |
| | | TTTTTTTTcagccaactccaaTTTTTTTT- |
| | | TAGCTCCCGTCCGTAGACGTCGG |
| UNCX | 1909 | -GCCCCGAGTGAAGT-GTTTTAGAGCTA- |
| | | CCAAAGCTCATTCGCGACTGAGC- |
| | | TTTTTTTTcagccaactccaaTTTTTTTT- |
| | | GCTCAGTCGCGAATGAGCTTTGG |
| UNCX | 1910 | g-CGGCCCGGGGAATT-GTTTTAGAGCTA- |
| | | CCAAAGCTCATTCGCGACTGAGC- |
| | | TTTTTTTTcagccaactccaaTTTTTTTT- |
| | | GCTCAGTCGCGAATGAGCTTTGG |
| UNCX | 1911 | g-ATTAGCAATCGATA-GTTTTAGAGCTA- |
| | | CCAAAGCTCATTCGCGACTGAGC- |
| | | TTTTTTTTcagccaactccaaTTTTTTTT- |
| | | GCTCAGTCGCGAATGAGCTTTGG |
| UNCX | 1912 | g-TGTCACAACAAGAC-GTTTTAGAGCTA- |
| | | CCAAAGCTCATTCGCGACTGAGC- |
| | | TTTTTTTTcagccaactccaaTTTTTTTT- |
| | | GCTCAGTCGCGAATGAGCTTTGG |
| UNCX | 1913 | -GCCCCGAGTGAAGT-GTTTTAGAGCTA- |
| | | CCATGGCACGATCGACACGGAGG- |
| | | TTTTTTTTcagccaactccaaTTTTTTTT- |
| | | CCTCCGTGTCGATCGTGCCATGG |
| UNCX | 1914 | g-CGGCCCGGGGAATT-GTTTTAGAGCTA- |
| | | CCATGGCACGATCGACACGGAGG- |
| | | TTTTTTTTcagccaactccaaTTTTTTTT- |
| | | CCTCCGTGTCGATCGTGCCATGG |
| UNCX | 1915 | g-ATTAGCAATCGATA-GTTTTAGAGCTA- |
| | | CCATGGCACGATCGACACGGAGG- |
| | | TTTTTTTTcagccaactccaaTTTTTTTT- |
| | | CCTCCGTGTCGATCGTGCCATGG |
| UNCX | 1916 | g-TGTCACAACAAGAC-GTTTTAGAGCTA- |
| | | CCATGGCACGATCGACACGGAGG- |
| | | TTTTTTTTcagccaactccaaTTTTTTTT- |
| | | CCTCCGTGTCGATCGTGCCATGG |
| UNCX | 1917 | -GCCCCGAGTGAAGT-GTTTTAGAGCTA- |
| | | CCCGAACTCTCTATCGAACGAGT- |
| | | TTTTTTTTcagccaactccaaTTTTTTTT- |
| | | ACTCGTTCGATAGAGAGTTCGGG |
| UNCX | 1918 | g-CGGCCCGGGGAATT-GTTTTAGAGCTA- |
| | | CCCGAACTCTCTATCGAACGAGT- |
| | | TTTTTTTTcagccaactccaaTTTTTTTT- |
| | | ACTCGTTCGATAGAGAGTTCGGG |
| UNCX | 1919 | g-ATTAGCAATCGATA-GTTTTAGAGCTA- |
| | | CCCGAACTCTCTATCGAACGAGT- |
| | | TTTTTTTTcagccaactccaaTTTTTTTT- |
| | | ACTCGTTCGATAGAGAGTTCGGG |
| UNCX | 1920 | g-TGTCACAACAAGAC-GTTTTAGAGCTA- |
| | | CCCGAACTCTCTATCGAACGAGT- |
| | | TTTTTTTTcagccaactccaaTTTTTTTT- |
| | | ACTCGTTCGATAGAGAGTTCGGG |
| UNCX | 1921 | -GCCCCGAGTGAAGT-GTTTTAGAGCTA- |
| | | CCTACACGATAGTGGTCGTGCGC- |
| | | TTTTTTTTcagccaactccaaTTTTTTTT- |
| | | GCGCACGACCACTATCGTGTAGG |
| UNCX | 1922 | g-CGGCCCGGGGAATT-GTTTTAGAGCTA- |
| | | CCTACACGATAGTGGTCGTGCGC- |
| | | TTTTTTTTcagccaactccaaTTTTTTTT- |
| | | GCGCACGACCACTATCGTGTAGG |
| UNCX | 1923 | g-ATTAGCAATCGATA-GTTTTAGAGCTA- |
| | | CCTACACGATAGTGGTCGTGCGC- |
| | | TTTTTTTTcagccaactccaaTTTTTTTT- |
| | | GCGCACGACCACTATCGTGTAGG |
| UNCX | 1924 | g-TGTCACAACAAGAC-GTTTTAGAGCTA- |
| | | CCTACACGATAGTGGTCGTGCGC- |
| | | TTTTTTTTcagccaactccaaTTTTTTTT- |
| | | GCGCACGACCACTATCGTGTAGG |
| UNCX | 1925 | -GCCCCGAGTGAAGT-GTTTTAGAGCTA- |
| | | CCCTGGCGGAACGTTCGAGTAAT- |
| | | TTTTTTTTcagccaactccaaTTTTTTTT- |
| | | ATTACTCGAACGTTCCGCCAGGG |
| UNCX | 1926 | g-CGGCCCGGGGAATT-GTTTTAGAGCTA- |
| | | CCCTGGCGGAACGTTCGAGTAAT- |
| | | TTTTTTTTcagccaactccaaTTTTTTTT- |
| | | ATTACTCGAACGTTCCGCCAGGG |
| UNCX | 1927 | g-ATTAGCAATCGATA-GTTTTAGAGCTA- |
| | | CCCTGGCGGAACGTTCGAGTAAT- |
| | | TTTTTTTTcagccaactccaaTTTTTTTT- |
| | | ATTACTCGAACGTTCCGCCAGGG |
| UNCX | 1928 | g-TGTCACAACAAGAC-GTTTTAGAGCTA- |
| | | CCCTGGCGGAACGTTCGAGTAAT- |
| | | TTTTTTTTcagccaactccaaTTTTTTTT- |
| | | ATTACTCGAACGTTCCGCCAGGG |
| UNCX | 1929 | -GCCCCGAGTGAAGT-GTTTTAGAGCTA- |
| | | CCTACACTCGACATCGGTAGCTA- |
| | | TTTTTTTTcagccaactccaaTTTTTTTT- |
| | | TAGCTACCGATGTCGAGTGTAGG |
| UNCX | 1930 | g-CGGCCCGGGGAATT-GTTTTAGAGCTA- |
| | | CCTACACTCGACATCGGTAGCTA- |
| | | TTTTTTTTcagccaactccaaTTTTTTTT- |
| | | TAGCTACCGATGTCGAGTGTAGG |
| UNCX | 1931 | g-ATTAGCAATCGATA-GTTTTAGAGCTA- |
| | | CCTACACTCGACATCGGTAGCTA- |
| | | TTTTTTTTcagccaactccaaTTTTTTTT- |
| | | TAGCTACCGATGTCGAGTGTAGG |
| UNCX | 1932 | g-TGTCACAACAAGAC-GTTTTAGAGCTA- |
| | | CCTACACTCGACATCGGTAGCTA- |
| | | TTTTTTTTcagccaactccaaTTTTTTTT- |
| | | TAGCTACCGATGTCGAGTGTAGG |

TABLE 2
Sequences of spacers and target gene

| | | SEQ ID |
|---|---|---|
| Gene target | spacer | NO: |
| ACAN | TGTGACACATACAT | 1940 |
| ACAN | GGGCGGCCGACAGG | 1941 |
| ACAN | GTGCCCGGACTCTG | 1942 |
| ACAN | CCCTGGCTCCGGAC | 1943 |
| COL2A1 | CGCCAGCCTCGAAA | 1944 |
| COL2A1 | GAACCGCCCGCCCC | 1945 |
| COL2A1 | CGGCGCACTAGGGG | 1946 |
| COL2A1 | GCCCCGGGTTTGGG | 1947 |
| MEF2D | CCGCAGCCTAGCTT | 1948 |
| MEF2D | TGACGGACAGGCGT | 1949 |
| MEF2D | CGGGGCCGCGTCCT | 1950 |
| MEF2D | CAGAGGCCTTTAAA | 1951 |
| pax9 | GCGTGGGGTAAGGG | 1952 |
| pax9 | CACGGCAATTTCTC | 1953 |
| pax9 | GTGACGCTAATATG | 1954 |
| pax9 | CCTAGGGGTAGGGA | 1955 |
| pax9 (set2) | AGGGGCGGGTCCGA | 1956 |
| pax9 (set2) | CTAAGCAGCAACGT | 1957 |
| pax9 (set2) | GCTAGCTCCCCACC | 1958 |
| pax9 (set2) | AGCTGCATGGTGAT | 1959 |
| RUNX2 | CCTTACAGGAGTTT | 1960 |
| RUNX2 | CACTATTACTGGAG | 1961 |
| RUNX2 | ACTGCCTACCACTG | 1962 |
| RUNX2 | TGTATCACATTCTG | 1963 |
| RUNX2 (set2) | AAGAGGTAAGTCGT | 1964 |
| RUNX2 (set2) | gcgcgcggcaatgc | 1965 |
| RUNX2 (set2) | AAGGAGCCTAGCCG | 1966 |
| RUNX2 (set2) | ACGCGGTGCCCCAA | 1967 |
| SOX5 | TAACCACACAATGA | 1968 |
| SOX5 | ACTCTCTTGTATTC | 1969 |
| SOX5 | AACAATGGCCAAGC | 1970 |
| SOX5 | TTCTGTCTTCAATA | 1971 |
| SOX5 (set2) | CTCTAGACAACCTC | 1972 |
| SOX5 (set2) | GACAAGTTGTTTAC | 1973 |
| SOX5 (set2) | AGAGAGCCTAGAAA | 1974 |
| SOX5 (set2) | GGTCAAGGAGTCCT | 1975 |
| SOX5 (set3) | TTGAGAGCAACACG | 1976 |
| SOX5 (set3) | TCATGACCAGCAAA | 1977 |
| SOX5 (set3) | CGGTCACCGCGGCC | 1978 |
| SOX5 (set3) | GTGCAAATAACAAA | 1979 |
| SOX6 | CCAAATGCAAGGAT | 1980 |
| SOX6 | CCAATCCTTGCATT | 1981 |
| SOX6 | GTGATAGTTAGCAA | 1982 |
| SOX6 | TGAAAAAGAACTCC | 1983 |
| SOX6 (set2) | ATAAGCTCAAAAGC | 1984 |
| SOX6 (set2) | AGTTGGAGTTACTA | 1985 |
| SOX6 (set2) | TTCAAGGACATGAA | 1986 |
| SOX6 (set2) | AACTACACTCAGTT | 1987 |
| SOX6 (set3) | GGGTTCCACGCCTT | 1988 |
| SOX6 (set3) | GTTTGTTCTACCTA | 1989 |
| SOX6 (set3) | GAGCAAAACAATTT | 1990 |
| SOX6 (set3) | TAAATGTGCCTGAC | 1991 |
| SOX6 (set4) | TGATGTTGCACGAC | 1992 |
| SOX6 (set4) | TGAAGCAACTACTA | 1993 |
| SOX6 (set4) | ATCGGCGAGACCAG | 1994 |
| SOX6 (set4) | TGAGACAAGAGGCG | 1995 |
| SOX8 | CTCAGGCGCGAGAC | 1996 |
| SOX8 | GCTTTCTTTATGGG | 1997 |
| SOX8 | AGGTCGCCGCGCGG | 1998 |
| SOX8 | gcccggcTACCCAT | 1999 |
| SOX9 | CAAACTTACACACT | 2000 |
| SOX9 | AAAGGGCGGACGGT | 2001 |
| SOX9 | ATTGGACCCGATTT | 2002 |
| SOX9 | GTGGCTCTAAGGTG | 2003 |
| SP1 | TGAGACGTAGGGAT | 2004 |
| SP1 | GCGAGTCTTGCCAT | 2005 |
| SP1 | GGACCGGACAGGGA | 2006 |
| SP1 | CCGCCCAATGAGGG | 2007 |
| TCF15 | AAAAGTTCGGATCT | 2008 |
| TCF15 | GTCGCCATTGGCCA | 2009 |
| TCF15 | CTCCCTCGCCTATA | 2010 |
| TCF15 | GGCCCGGGAGCCGG | 2011 |
| TCF7L2 | ATCCTTTCGGGCGC | 2012 |
| TCF7L2 | ATGCACACGTCACT | 2013 |
| TCF7L2 | GAACGGAGTAGTCT | 2014 |
| TCF7L2 | GGGATTCTGGGCGA | 2015 |
| TWIST1 | ACCCCGAGGAAGGG | 2016 |
| TWIST1 | GCGCTAGGGTTCGG | 2017 |
| TWIST1 | AGCCCCATCCGGAG | 2018 |
| TWIST1 | GGCCTGACGTGAGG | 2019 |
| UNCX | GCCCCGAGTGAAGT | 2020 |
| UNCX | CGGCCCGGGGAATT | 2021 |
| UNCX | ATTAGCAATCGATA | 2022 |
| UNCX | TGTCACAACAAGAC | 2023 |

TABLE 3
Sequences of Stem1 and Stem2

| SEQ ID | | SEQ ID | |
|---|---|---|---|
| NO: | stem1 | NO: | stem2 (reverse complement) |
| 2024 | CCTACACTCGACATCGGTAGC | 2047 | TAGCTACCGATGTCGAGTGTA |
| | TA | | GG |
| 2025 | CCCTGGCGGAACGTTCGAGTA | 2048 | ATTACTCGAACGTTCCGCCAGG |
| | AT | | G |
| 2026 | CCTACACGATAGTGGTCGTGC | 2049 | GCGCACGACCACTATCGTGTA |
| | GC | | GG |
| 2027 | CCCGAACTCTCTATCGAACGA | 2050 | ACTCGTTCGATAGAGAGTTCG |
| | GT | | GG |
| 2028 | CCATGGCACGATCGACACGGA | 2051 | CCTCCGTGTCGATCGTGCCATG |
| | GG | | G |
| 2029 | CCAAAGCTCATTCGCGACTGA | 2052 | GCTCAGTCGCGAATGAGCTTTG |
| | GC | | G |
| 2030 | CCGACGTCTACGGACGGGAGC | 2053 | TAGCTCCCGTCCGTAGACGTCG |
| | TA | | G |
| 2031 | CCCGAGAGGTAGTAGACGACG | 2054 | TGCGTCGTCTACTACCTCTCGG |
| | CA | | G |
| 2032 | CCCGTCGTCACGTATGCGTAG | 2055 | TGCTACGCATACGTGACGACG |
| | CA | | GG |
| 2033 | CCTATAGTCACGAATCGTAGG | 2056 | ACCCTACGATTCGTGACTATAG |
| | GT | | G |
| 2034 | CCGCGGACGGTAAGCACGGAA | 2057 | TATTCCGTGCTTACCGTCCGCG |
| | TA | | G |
| 2035 | CCCTTACTCGCGATACTCTCGA | 2058 | GTCGAGAGTATCGCGAGTAAG |
| | C | | GG |
| 2036 | CCGATCAATGCGGTCTGCGTA | 2059 | GTTACGCAGACCGCATTGATC |
| | AC | | GG |
| 2037 | CCCGTTATCGACGTTCAAGGA | 2060 | GTTCCTTGAACGTCGATAACGG |
| | AC | | G |
| 2038 | CCGATAGTGCTAAACGACGCT | 2061 | AAAGCGTCGTTTAGCACTATCG |
| | TT | | G |
| 2039 | CCTCGTACTAGTCTCGCATGA | 2062 | GGTCATGCGAGACTAGTACGA |
| | CC | | GG |
| 2040 | CCATAGCGGTACTATCGGCAT | 2063 | AGATGCCGATAGTACCGCTAT |
| | CT | | GG |
| 2041 | CCGCTAGGACGTTCAACGGAG | 2064 | GACTCCGTTGAACGTCCTAGCG |
| | TC | | G |
| 2042 | CCGCATCGTATTATCTGCGAA | 2065 | GCTTCGCAGATAATACGATGC |
| | GC | | GG |
| 2043 | CCTGGTTATAGCGGACGCACT | 2066 | ACAGTGCGTCCGCTATAACCA |
| | GT | | GG |
| 2044 | CCTGAAGGTAAAGATCGGGTC | 2067 | GAGGACCCGATCTTTACCTTCA |
| | CTC | | GG |
| 2045 | CCTTCCCGACTTCCGTAGGAG | 2068 | GCGCTCCTACGGAAGTCGGGA |
| | CGC | | AGG |
| 2046 | CCGTCGTTGTACCGTCTACTTG | 2069 | GTCAAGTAGACGGTACAACGA |
| | AC | | CGG |

### EMBODIMENTS

[0233] The following non-limiting embodiments provide illustrative examples of the invention, but do not limit the scope of the invention.
[0234] 1. A method for conversion of a plurality of stem cells into a plurality of chondrogenic cells, via modulation of expression levels of a plurality of distinct target genes comprising a first homeobox protein and a second homeobox protein, the method comprising:
[0235] a) contacting a first polynucleotide sequence in the plurality of stem cells by a first heterologous gene regulating moiety to modulate expression level of the first homeobox protein that is operatively coupled to the first polynucleotide sequence; and
[0236] b) contacting a second polynucleotide sequence in the plurality of stem cells by a second heterologous gene regulating moiety, to modulate expression level of the second homeobox protein that is operatively coupled to the second polynucleotide sequence.
[0237] 2. The method of embodiment 1, wherein (b) is performed subsequent to (a), and wherein the steps of (a) and (b) effect modulation of the first homeobox protein and the second homeobox protein in a sequential manner.
[0238] 3. The method of embodiment 1, wherein (i) the first polynucleotide sequence is upstream to or encodes the first homeobox protein or (ii) the second polynucleotide sequence is upstream to or encodes the second homeobox protein.
[0239] 4. The method of embodiment 1, wherein (iii) the expression level of the first homeobox protein is enhanced upon the contacting by the first heterologous gene regulating moiety or (iv) the expression level of the second homeobox protein is enhanced upon the contacting by the second heterologous gene regulating moiety.
[0240] 5. The method of embodiment 1, further comprising modulating expression of an additional target gene of the plurality of target genes, wherein the additional target gene comprises one or more members selected from the group consisting of a T-box transcription factor (TBX), a basic helix-loop-helix transcription factor (bHLH), a Sox, and a collagen.
[0241] 6. The method of embodiment 5, wherein the expression level of the additional target gene is modulated (i) prior to, (ii) simultaneously with, or (iii) subsequent to the second homeobox protein.
[0242] 7. The method of embodiment 5, wherein the expression level of the additional target gene is enhanced.
[0243] 8. The method of embodiment 1, wherein the method comprises contacting the plurality of stem cells with a heterologous genetic circuit comprising a plurality of gate units, wherein the heterologous genetic circuit is activatable to induce the plurality of gate units to modulate expression levels of the plurality of distinct target genes in a sequential manner to effect the conversion, and wherein the plurality of gate units comprises:
[0244] (i) a first gate unit that is preconfigured to effect the first heterologous gene regulating moiety to modulate the expression level of the first homeobox protein; and
[0245] (ii) a second gate unit that is preconfigured to effect the second heterologous gene regulating moiety to modulate the expression level of the second homeobox protein, wherein, upon activation of the heterologous genetic circuit, the plurality of gate units operates to effect the conversion.
[0246] 9. The method of embodiment 8, wherein (i) the first gate unit is activatable to express the first heterologous gene regulating moiety or (ii) the second gate unit is activatable to express the second heterologous gene regulating moiety.
[0247] 10. The method of embodiment 9, wherein the plurality of gate units comprises an additional gate unit that is preconfigured to modulate expression level of an additional target gene of the plurality of distinct target genes, wherein the additional target gene encodes one or more members selected from the group consisting of a T-box transcription factor (TBX), a basic helix-loop-helix transcription factor (bHLH), a Sox, and a collagen.
[0248] 11. The method of embodiment 1, wherein the conversion occurs in less than about 14 days, less than about 10 days, less than about 7 days, or less than about 5 days.
[0249] 12. A method for conversion of a plurality of stem cells into a plurality of chondrogenic cells, via modulation of expression levels of a plurality of distinct target genes comprising a first distinct target gene and a second distinct target gene, the method comprising:
[0250] a) contacting a first polynucleotide sequence in the plurality of stem cells by a first heterologous gene regulating moiety to modulate expression level of the first distinct target gene that is operatively coupled to the first polynucleotide sequence; and
[0251] b) contacting a second polynucleotide sequence in the plurality of stem cells by a second heterologous gene regulating moiety, to modulate expression level of the second distinct target gene that is operatively coupled to the second polynucleotide sequence, wherein a combination of the first and second distinct target genes is:
[0252] i) a first homeobox protein and a second homeobox protein that are different;
[0253] ii) two different members selected from the group consisting of a homeobox protein, a T-box transcription factor (TBX), and a basic helix-loop-helix transcription factor (bHLH); or
[0254] iii) a first member selected from the group consisting of the homeobox protein, the TBX, and the bHLH, and a second member comprising SOX or collagen.
[0255] 13. The method of embodiment 12, wherein the combination is (i) the first homeobox protein and the second homeobox protein.
[0256] 14. The method of embodiment 12, wherein the combination is (ii) the two different members selected from the group consisting of the homeobox protein, the TBX, and the bHLH.
[0257] 15. The method of embodiment 12, wherein the combination is (iii) the first member selected from the group consisting of the homeobox protein, the TBX, and the bHLH, and the second member comprising the SOX or the collagen.
[0258] 16. The method of embodiment 12, wherein (b) is performed subsequent to (a), thereby to effect modulation of the first distinct target gene and the second distinct target gene in a sequential manner.
[0259] 17. The method of embodiment 12, wherein (i) the first polynucleotide sequence is upstream to or encodes the first distinct target gene or (ii) the second polynucleotide sequence is upstream to or encodes the second distinct target gene.
[0260] 18. The method of embodiment 12, wherein (ii) the expression level of the first distinct target gene is enhanced upon the contacting by the first heterologous gene regulating moiety or (ii) the expression level of the second distinct target gene is enhanced upon the contacting by the second heterologous gene regulating moiety.
[0261] 19. The method of embodiment 12, wherein the method comprises contacting the plurality of stem cells with a heterologous genetic circuit comprising a plurality of gate units, wherein the heterologous genetic circuit is activatable to induce the plurality of gate units to modulate expression levels of the plurality of distinct target genes in a sequential manner to effect the conversion, and wherein the plurality of gate units comprises:
   [0262] (i) a first gate unit that is preconfigured to effect the first heterologous gene regulating moiety to modulate the expression level of the first distinct target gene; and
   [0263] (ii) a second gate unit that is preconfigured to effect the second heterologous gene regulating moiety to modulate the expression level of the second distinct target gene, wherein, upon activation of the heterologous genetic circuit, the plurality of gate units operates to effect the conversion.
[0264] 20. The method of embodiment 12, wherein the conversion occurs in less than about 14 days, less than about 10 days, less than about 7 days, or less than about 5 days.
[0265] 21. A method for conversion of a plurality of stem cells towards chondrogenic differentiation, the method comprising:
   [0266] contacting a polynucleotide sequence in the plurality of stem cells by a heterologous gene regulating moiety to modulate expression level of a target gene that is operatively coupled to the polynucleotide sequence,
   [0267] wherein, within less than 7 days following the contacting, a conversion rate from the plurality of stem cells to chondrogenic cells is characterized to be at least about 30%.
[0268] 22. The method of embodiment 21, wherein the conversion rate is at least about 40%, at least about 50%, at least about 60%, at least about 70%, or at least about 80%.
[0269] 23. The method of embodiment 21, wherein the conversion rate is observed within less than about 6 days following the contacting or within less than about 5 days following the contacting.
[0270] 24. The method of embodiment 21, wherein the expression level of the target gene is enhanced upon the contacting by the heterologous gene regulating moiety.
[0271] 25. The method of embodiment 21, wherein the target gene comprises one or more members selected from the group consisting of a homeobox protein, a T-box transcription factor (TBX), a basic helix-loop-helix transcription factor (bHLH), a SOX, and a collagen.
[0272] 26. The method of embodiment 21, wherein the target gene comprises a plurality of distinct target genes comprising a first distinct target and a second distinct target gene, and wherein the contacting comprises:
   [0273] (a) contacting a first polynucleotide sequence in the plurality of stem cells by a first heterologous gene regulating moiety to modulate expression level of the first distinct target gene that is operatively coupled to the first polynucleotide sequence; and
   [0274] (b) contacting a second polynucleotide sequence in the plurality of stem cells by a second heterologous gene regulating moiety, to modulate expression level of the second distinct target gene that is operatively coupled to the second polynucleotide sequence.
[0275] 27. The method of embodiment 26, wherein a combination of the first and second distinct target genes is:
[0276] (i) a first homeobox protein and a second homeobox protein that are different;
[0277] (ii) two different members selected from the group consisting of a homeobox protein, a T-box transcription factor (TBX), and a basic helix-loop-helix transcription factor (bHLH); or
[0278] (iii) a first member selected from the group consisting of the homeobox protein, the TBX, and the bHLH, and a second member comprising SOX or collagen.
[0279] 28. The method of embodiment 26, wherein the steps of (a) and (b) effect modulation of the first distinct target gene and the second distinct target gene in a sequential manner.
[0280] 29. The method of embodiment 26, wherein the contacting comprises:
   [0281] contacting the plurality of stem cells with a heterologous genetic circuit comprising a plurality of gate units, wherein the heterologous genetic circuit is activatable to induce the plurality of gate units to modulate expression levels of the plurality of distinct target genes in a sequential manner to effect the conversion, and wherein the plurality of gate units comprises:
[0282] (i) a first gate unit that is preconfigured to effect the first heterologous gene regulating moiety to modulate the expression level of the first distinct target gene; and
[0283] (ii) a second gate unit that is preconfigured to effect the second heterologous gene regulating moiety to modulate the expression level of the second distinct target gene,
   [0284] wherein, upon activation of the heterologous genetic circuit, the plurality of gate units operates to effect the conversion.
[0285] 30. The method of embodiment 21, wherein the target gene is an endogenous target gene.
[0286] 31. A method for treating a subject in need thereof, the method comprising:
   [0287] administering a plurality of chondrogenic cells to the subject, wherein the plurality of chondrogenic cells is prepared by subjecting a plurality of stem cells to ex vivo differentiation,
   [0288] wherein, within less than 7 days of the ex vivo differentiation, a conversion rate from the plurality of stem cells to the plurality of chondrogenic cells is characterized to be at least about 30%.
[0289] 32. The method of embodiment 31, wherein the conversion rate is at least about 40%, at least about 50%, at least about 60%, at least about 70%, or at least about 80%.
[0290] 33. The method of embodiment 31, wherein the conversion rate is observed within less than about 6 days following the contacting or within less than about 5 days following the contacting.
[0291] 34. The method of embodiment 31, wherein the plurality of chondrogenic cells is subjected to ex vivo culture for less than about 2 weeks, less than about 10 days, less than about 8 days, less than about 7 days, less than about 6 days, or less than about 5 days.
[0292] 35. The method of embodiment 31, wherein the ex vivo differentiation comprises modulating expression level of a target gene comprising one or more members selected from the group consisting of a homeobox protein, a T-box transcription factor (TBX), a basic helix-loop-helix transcription factor (bHLH), a SOX, and a collagen.
[0293] 36. The method of embodiment 35, wherein the target gene is an endogenous target gene.
[0294] 37. The method of embodiment 35, wherein the target gene comprises a plurality of distinct target genes that comprises:
   [0295] (i) a first homeobox protein and a second homeobox protein that are different;
   [0296] (ii) two different members selected from the group consisting of a homeobox protein, a T-box transcription factor (TBX), and a basic helix-loop-helix transcription factor (bHLH); or
   [0297] (iii) a first member selected from the group consisting of the homeobox protein, the TBX, and the bHLH, and a second member comprising SOX or collagen.
[0298] 38. The method of any one of the preceding embodiments, wherein the plurality of chondrogenic cells comprises chondroprogenitor cells or chondrocytes.
[0299] 39. The method of any one of the preceding embodiments, wherein the plurality of chondrogenic cells is characterized to be CD146+/CD73+, CD146+/CD112+, or CD326+/CD309+.
[0300] 40. The method of any one of the preceding embodiments, wherein the plurality of stem cells comprise pluripotent stem cells (PSCs) or mesodermal cells.
[0301] 41. The method of any one of the preceding embodiments, wherein the plurality of distinct target genes are endogenous genes of the plurality of stem cells.
[0302] 42. The method of any one of the preceding embodiments, wherein the first heterologous gene regulating moiety or the second heterologous gene regulating moiety comprises (i) an endonuclease or (ii) a guide nucleic acid (gNA) molecule.
[0303] 43. The method of embodiment 42, wherein the endonuclease and the gNA form a complex capable of binding to a respective target polynucleotide sequence.
[0304] 44. The method of embodiment 42, wherein the endonuclease is a Cas protein.
[0305] 45. The method of any one of the preceding embodiments, wherein the conversion occurs in conditions substantially free of (i) serum and/or (ii) an exogenous cell differentiation regulatory factor.
[0306] 46. The method of embodiment 45, wherein the exogenous cell differentiation regulatory factor comprises one or more members selected from the group consisting of TGFbeta1, TGFbeta2, TGFbeta3, BMP2, BMP4, BMP6, MP7, and IGF1.
[0307] 47. The method of embodiment 45, wherein the exogenous cell differentiation regulatory factor is a chondrogenic factor comprising one or more members selected from the group consisting of dexamethasone, ascorbate, insulin, transferrin, and selenous acid.
[0308] 48. The method of any one of the preceding embodiments, wherein the first homeobox protein, the second homeobox protein, or the homeobox protein is a paired box (PRD)-class homeobox protein.
[0309] 49. The method of embodiment 48, wherein the PRD-class homeobox protein is MIXL1 or UNCX.
[0310] 50. The method of any one of the preceding embodiments, wherein the first homeobox protein,
   [0311] the second homeobox protein, or the homeobox protein is not a member of Pax3 and Pax7.
[0312] 51. The method of any one of the preceding embodiments, wherein the TBX comprises one or more members selected from the group consisting of TBXT, TBR1, TBX1, TBX2, TBX3, TBX4, TBX5, TBX6, TBX10, TBX15, TBX18, TBX19, TBX20, TBX21, and TBX22.
[0313] 52. The method of embodiment 51, wherein the TBX is TBXT or TBX6.
[0314] 53. The method of any one of the preceding embodiments, wherein the bHLH comprises one or more members selected from the group consisting of Group A bHLH, Group B bHLH, Group C bHLH, Group D bHLH, Group E bHLH, and Group F bHLH.
[0315] 54. The method of embodiment 53, wherein the bHLH is the Group A bHLH.
[0316] 55. The method of embodiment 53, wherein the bHLH is MSGN1 or TCF15.
[0317] 56. The method of any one of the preceding embodiments, wherein the SOX comprises one or more members selected from the group consisting of SOXA, SOXB1, SOXB2, SOXC, SOXD, SOXE, SOXF, SOXG, and SOXH.
[0318] 57. The method of embodiment 56, wherein the SOX is SOXD.
[0319] 58. The method of embodiment 57, wherein the SOXD is SOX6.
[0320] 59. The method of embodiment 56, wherein the SOX is SOXE.
[0321] 60. The method of embodiment 59, wherein the SOXE is SOX9.
[0322] 61. The method of any one of the preceding embodiments, wherein the collagen comprises one or more members selected from the group consisting of Type I collagen, Type II collagen, Type III collagen, Type IV collagen, and Type V collagen.
[0323] 62. The method of embodiment 61, wherein the collagen is Type II collagen.
[0324] 63. The method of embodiment 62, wherein the Type II collagen is COL2A1.
[0325] 64. The method of any one of the preceding embodiments, wherein the conversion occurs in less than about 10 days, less than about 7 days, or less than about 5 days.
[0326] 65. The method of any one of the preceding embodiments, further comprising storing the plurality of tissue-specific progenitor cells or the plurality of chondrogenic cells in a sterile vial.
[0327] 66. The method of any one of the preceding embodiments, further comprising administering the plurality of tissue-specific progenitor cells or the plurality of chondrogenic cells to a subject in need thereof.
[0328] 67. The method of any one of the preceding embodiments, wherein the administering comprises one or more knee administrations.
[0329] 68. A system for conversion of a plurality of stem cells into a plurality of chondrogenic cells, via modulation of expression levels of a plurality of distinct target genes comprising a first homeobox protein and a second homeobox protein, the system comprising:
[0330] a) a first heterologous gene regulating moiety configured to bind a first polynucleotide sequence in the plurality of stem cells to modulate expression level of the first homeobox protein that is operatively coupled to the first polynucleotide sequence; and
[0331] b) a second heterologous gene regulating moiety configured to bind a second polynucleotide sequence in the plurality of stem cells to modulate expression level of the second homeobox protein that is operatively coupled to the second polynucleotide sequence.
[0332] 69. The system of embodiment 68, wherein the first and second heterologous gene regulating moieties are configured to effect modulation of the first homeobox protein and the second homeobox protein in a sequential manner.
[0333] 70. The system of embodiment 68, wherein (i) the first polynucleotide sequence is upstream to or encodes the first homeobox protein or (ii) the second polynucleotide sequence is upstream to or encodes the second homeobox protein.
[0334] 71. The system of embodiment 68, wherein (ii) the expression level of the first homeobox protein is enhanced upon the contacting by the first heterologous gene regulating moiety or (ii) the expression level of the second homeobox protein is enhanced upon the contacting by the second heterologous gene regulating moiety.
[0335] 72. The system of embodiment 68, further comprising an additional heterologous gene regulating moiety configured to modulate expression of an additional target gene of the plurality of target genes, wherein the additional target gene comprises one or more members selected from the group consisting of a T-box transcription factor (TBX), a basic helix-loop-helix transcription factor (bHLH), a Sox, and a collagen.
[0336] 73. The system of embodiment 72, wherein the expression level of the additional target gene is modulated (i) prior to, (ii) simultaneously with, or (iii) subsequent to the second homeobox protein.
[0337] 74. The system of embodiment 72, wherein the expression level of the additional target gene is enhanced.
[0338] 75. The system of embodiment 68, comprising a heterologous genetic circuit comprising a plurality of gate units, wherein the heterologous genetic circuit is activatable to induce the plurality of gate units to modulate expression levels of the plurality of distinct target genes in a sequential manner to effect the conversion, and wherein the plurality of gate units comprises:
   [0339] (i) a first gate unit that is preconfigured to effect the first heterologous gene regulating moiety to modulate the expression level of the first homeobox protein; and
   [0340] (ii) a second gate unit that is preconfigured to effect the second heterologous gene regulating moiety to modulate the expression level of the second homeobox protein,
   [0341] wherein, upon activation of the heterologous genetic circuit, the plurality of gate units operates to effect the conversion.
[0342] 76. The system of embodiment 75, wherein (i) the first gate unit is activatable to express the first heterologous gene regulating moiety or (ii) the second gate unit is activatable to express the second heterologous gene regulating moiety.
[0343] 77. The system of embodiment 75, wherein the plurality of gate units comprises an additional gate unit that is preconfigured to modulate expression level of an additional target gene of the plurality of distinct target genes, wherein the additional target gene encodes one or more members selected from the group consisting of a T-box transcription factor (TBX), a basic helix-loop-helix transcription factor (bHLH), a Sox, and a collagen.
[0344] 78. The system of embodiment 68, wherein the conversion occurs in less than about 14 days, less than about 10 days, less than about 7 days, or less than about 5 days.
[0345] 79. A system for conversion of a plurality of stem cells into a plurality of chondrogenic cells, via modulation of expression levels of a plurality of distinct target genes comprising a first distinct target gene and a second distinct target gene, the system comprising:
[0346] a) a first heterologous gene regulating moiety configured to bind a first polynucleotide sequence in the plurality of stem cells to modulate expression level of the first distinct target gene that is operatively coupled to the first polynucleotide sequence; and
[0347] b) a second heterologous gene regulating moiety configured to bind a second polynucleotide sequence in the plurality of stem cells to modulate expression level of the second distinct target gene that is operatively coupled to the second polynucleotide sequence,
   [0348] wherein a combination of the first and second distinct target genes is:
      [0349] (i) a first homeobox protein and a second homeobox protein that are different;
      [0350] (ii) two different members selected from the group consisting of a homeobox protein, a T-box transcription factor (TBX), and a basic helix-loop-helix transcription factor (bHLH); or
      [0351] (iii) first member selected from the group consisting of the homeobox protein, the TBX, and the bHLH, and a second member comprising SOX or collagen.
[0352] 80. The system of embodiment 79, wherein the combination is (i) the first homeobox protein and the second homeobox protein.
[0353] 81. The system of embodiment 79, wherein the combination is (ii) the two different members selected from the group consisting of the homeobox protein, the TBX, and the bHLH.
[0354] 82. The system of embodiment 79, wherein the combination is (iii) the first member selected from the group consisting of the homeobox protein, the TBX, and the bHLH, and the second member comprising the SOX or the collagen.
[0355] 83. The system of embodiment 79, wherein the first and second heterologous gene regulating moieties are configured to effect modulation of the first distinct target gene prior to that of the second distinct target gene in a sequential manner.
[0356] 84. The system of embodiment 79, wherein (i) the first polynucleotide sequence is upstream to or encodes the first distinct target gene or (ii) the second polynucleotide sequence is upstream to or encodes the second distinct target gene.
[0357] 85. The system of embodiment 79, wherein (ii) the expression level of the first distinct target gene is enhanced upon the contacting by the first heterologous gene regulating moiety or (ii) the expression level of the second distinct target gene is enhanced upon the contacting by the second heterologous gene regulating moiety.
[0358] 86. The system of embodiment 79, comprising a heterologous genetic circuit comprising a plurality of gate units, wherein the heterologous genetic circuit is activatable to induce the plurality of gate units to modulate expression levels of the plurality of distinct target genes in a sequential manner to effect the conversion, and wherein the plurality of gate units comprises:
   [0359] (i) a first gate unit that is preconfigured to effect the first heterologous gene regulating moiety to modulate the expression level of the first distinct target gene; and
   [0360] (ii) a second gate unit that is preconfigured to effect the second heterologous gene regulating moiety to modulate the expression level of the second distinct target gene,
   [0361] wherein, upon activation of the heterologous genetic circuit, the plurality of gate units operates to effect the conversion.
[0362] 87. The system of embodiment 79, wherein the conversion occurs in less than about 14 days, less than about 10 days, less than about 7 days, or less than about 5 days.
[0363] 88. A system for conversion of a plurality of stem cells towards chondrogenic differentiation, the system comprising:
   [0364] a heterologous gene regulating moiety configured to bind a polynucleotide sequence in the plurality of stem cells to modulate expression level of a target gene that is operatively coupled to the polynucleotide sequence,
   [0365] wherein, within less than 7 days following the contacting, a conversion rate from the plurality of stem cells to chondrogenic cells is characterized to be at least about 30%.
[0366] 89. The system of embodiment 88, wherein the conversion rate is at least about 40%, at least about 50%, at least about 60%, at least about 70%, or at least about 80%.
[0367] 90. The system of embodiment 88, wherein the conversion rate is observed within less than about 6 days following the contacting or within less than about 5 days following the contacting.
[0368] 91. The system of embodiment 88, wherein the expression level of the target gene is enhanced upon the contacting by the heterologous gene regulating moiety.
[0369] 92. The system of embodiment 88, wherein the target gene comprises one or more members selected from the group consisting of a homeobox protein, a T-box transcription factor (TBX), a basic helix-loop-helix transcription factor (bHLH), a SOX, and a collagen.
[0370] 93. The system of embodiment 88, wherein the target gene comprises a plurality of distinct target genes comprising a first distinct target and a second distinct target gene, and wherein the system comprises:
[0371] a) a first heterologous gene regulating moiety configured to bind a first polynucleotide sequence in the plurality of stem cells to modulate expression level of the first distinct target gene that is operatively coupled to the first polynucleotide sequence; and
[0372] b) a second heterologous gene regulating moiety configured to bind a second polynucleotide sequence in the plurality of stem cells to modulate expression level of the second distinct target gene that is operatively coupled to the second polynucleotide sequence.
[0373] 94. The system of embodiment 93, wherein a combination of the first and second distinct target genes is:
   [0374] (i) a first homeobox protein and a second homeobox protein that are different;
   [0375] (ii) two different members selected from the group consisting of a homeobox protein, a T-box transcription factor (TBX), and a basic helix-loop-helix transcription factor (bHLH); or
   [0376] (iii) a first member selected from the group consisting of the homeobox protein, the TBX, and the bHLH, and a second member comprising SOX or collagen.
[0377] 95. The system of embodiment 93, wherein the first and second heterologous gene regulating moieties are configured to effect modulation of the first distinct target gene and the second distinct target gene in a sequential manner.
[0378] 96. The system of embodiment 93, comprising a heterologous genetic circuit comprising a plurality of gate units, wherein the heterologous genetic circuit is activatable to induce the plurality of gate units to modulate expression levels of the plurality of distinct target genes in a sequential manner to effect the conversion, and wherein the plurality of gate units comprises:
   [0379] (i) a first gate unit that is preconfigured to effect the first heterologous gene regulating moiety to modulate the expression level of the first distinct target gene; and
   [0380] (ii) a second gate unit that is preconfigured to effect the second heterologous gene regulating moiety to modulate the expression level of the second distinct target gene,
   [0381] wherein, upon activation of the heterologous genetic circuit, the plurality of gate units operates to effect the conversion.
[0382] 97. The system of embodiment 88, wherein the target gene is an endogenous target gene.
[0383] 98. A composition comprising any one of the preceding embodiments.
[0384] 99. A composition for treating a subject in need thereof, the composition comprising:
   [0385] a plurality of chondrogenic cells prepared by subjecting a plurality of stem cells to ex vivo differentiation,
   [0386] wherein, within less than 7 days of the ex vivo differentiation, a conversion rate from the plurality of stem cells to the plurality of chondrogenic cells is characterized to be at least about 30%.
[0387] 100. The composition of embodiment 99, wherein the conversion rate is at least about 40%, at least about 50%, at least about 60%, at least about 70%, or at least about 80%.
[0388] 101. The composition of embodiment 99, wherein the conversion rate is observed within less than about 6 days following the contacting or within less than about 5 days following the contacting.
[0389] 102. The composition of embodiment 99, wherein the plurality of chondrogenic cells is subjected to ex vivo culture for less than about 2 weeks, less than about 10 days, less than about 8 days, less than about 7 days, less than about 6 days, or less than about 5 days.
[0390] 103. The composition of embodiment 99, wherein the ex vivo differentiation is characterized by modulation of expression level of a target gene comprising one or more members selected from the group consisting of a homeobox protein, a T-box transcription factor (TBX), a basic helix-loop-helix transcription factor (bHLH), a SOX, and a collagen.
[0391] 104. The composition of 99, wherein the target gene is an endogenous target gene.
[0392] 105. The composition of 99, wherein the target gene comprises a plurality of distinct target genes that comprises:
   [0393] (i) a first homeobox protein and a second homeobox protein that are different;
   [0394] (ii) two different members selected from the group consisting of a homeobox protein, a T-box transcription factor (TBX), and a basic helix-loop-helix transcription factor (bHLH); or
   [0395] (iii) a first member selected from the group consisting of the homeobox protein, the TBX, and the bHLH, and a second member comprising SOX or collagen.
[0396] 106. The system or composition of any one of the preceding embodiments, wherein the plurality of chondrogenic cells comprises chondroprogenitor cells or chondrocytes.
[0397] 107. The system or composition of any one of the preceding embodiments, wherein the plurality of chondrogenic cells is characterized to be CD146+/CD73+, CD146+/CD112+, or CD326+/CD309+.
[0398] 108. The system or composition of any one of the preceding embodiments, wherein the plurality of stem cells comprise pluripotent stem cells (PSCs) or mesodermal cells.
[0399] 109. The system or composition of any one of the preceding embodiments, wherein the plurality of distinct target genes are endogenous genes of the plurality of stem cells.
[0400] 110. The system or composition of any one of the preceding embodiments, wherein the first heterologous gene regulating moiety or the second heterologous gene regulating moiety comprises (i) an endonuclease or (ii) a guide nucleic acid (gNA) molecule.
[0401] 111. The system or composition of any one of the preceding embodiments, wherein the endonuclease and the gNA form a complex capable of binding to a respective target polynucleotide sequence.
[0402] 112. The system or composition of any one of the preceding embodiments, wherein the endonuclease is a Cas protein.
[0403] 113. The system or composition of any one of the preceding embodiments, wherein the conversion occurs in conditions substantially free of (i) serum and/or (ii) an exogenous cell differentiation regulatory factor.
[0404] 114. The system or composition of any one of the preceding embodiments, wherein the exogenous cell differentiation regulatory factor comprises one or more members selected from the group consisting of TGFbeta1, TGFbeta2, TGFbeta3, BMP2, BMP4, BMP6, MP7, and IGF1.
[0405] 115. The system or composition of any one of the preceding embodiments, wherein the exogenous cell differentiation regulatory factor is a chondrogenic factor comprising one or more members selected from the group consisting of dexamethasone, ascorbate, insulin, transferrin, and selenous acid.
[0406] 116. The system or composition of any one of the preceding embodiments, wherein the first homeobox protein, the second homeobox protein, or the homeobox protein is a paired box (PRD)-class homeobox protein.
[0407] 117. The system or composition of any one of the preceding embodiments, wherein the PRD-class homeobox protein is MIXL1 or UNCX.
[0408] 118. The system or composition of any one of the preceding embodiments, wherein the first homeobox protein, the second homeobox protein, or the homeobox protein is not a member of Pax3 and Pax7.
[0409] 119. The system or composition of any one of the preceding embodiments, wherein the TBX comprises one or more members selected from the group consisting of TBXT, TBR1, TBX1, TBX2, TBX3, TBX4, TBX5, TBX6, TBX10, TBX15, TBX18, TBX19, TBX20, TBX21, and TBX22.
[0410] 120. The system or composition of any one of the preceding embodiments, wherein the TBX is TBXT or TBX6.
[0411] 121. The system or composition of any one of the preceding embodiments, wherein the bHLH comprises one or more members selected from the group consisting of Group A bHLH, Group B bHLH, Group C bHLH, Group D bHLH, Group E bHLH, and Group F bHLH.
[0412] 122. The system or composition of any one of the preceding embodiments, wherein the bHLH is the Group A bHLH.
[0413] 123. The system or composition of any one of the preceding embodiments, wherein the bHLH is MSGN1 or TCF15.
[0414] 124. The system or composition of any one of the preceding embodiments, wherein the SOX comprises one or more members selected from the group consisting of SOXA, SOXB1, SOXB2, SOXC, SOXD, SOXE, SOXF, SOXG, and SOXH.
[0415] 125. The system or composition of any one of the preceding embodiments, wherein the SOX is SOXD.
[0416] 126. The system or composition of any one of the preceding embodiments, wherein the SOXD is SOX6.
[0417] 127. The system or composition of any one of the preceding embodiments, wherein the SOX is SOXE.
[0418] 128. The system or composition of any one of the preceding embodiments, wherein the SOXE is SOX9.
[0419] 129. The system or composition of any one of the preceding embodiments, wherein the collagen comprises one or more members selected from the group consisting of Type I collagen, Type II collagen, Type III collagen, Type IV collagen, and Type V collagen.
[0420] 130. The system or composition of any one of the preceding embodiments, wherein the collagen is Type II collagen.
[0421] 131. The system or composition of any one of the preceding embodiments, wherein the Type II collagen is COL2A1.
[0422] 132. The system or composition of any one of the preceding embodiments, wherein the conversion occurs in less than about 10 days, less than about 7 days, or less than about 5 days.

[0423] Systems and methods of the present disclosure may be combined with or modified by other systems and methods for cell programming, such as, for example, those described in International Patent Application No. PCT/US2018/052211, International Patent Application No. PCT/US2018/052211, International Patent Application No. PCT/US2023/028169, International Patent Application No. PCT/US2023/028255, and International Patent Application No. PCT/US2023/028033, each of which is incorporated herein by reference in its entirety.

[0424] While preferred embodiments of the present invention have been shown and described herein, it will be obvious to those skilled in the art that such embodiments are provided by way of example only. It is not intended that the invention be limited by the specific examples provided within the specification. While the invention has been described with reference to the aforementioned specification, the descriptions and illustrations of the embodiments herein are not meant to be construed in a limiting sense. Numerous variations, changes, and substitutions will now occur to those skilled in the art without departing from the invention. Furthermore, it shall be understood that all aspects of the invention are not limited to the specific depictions, configurations or relative proportions set forth herein which depend upon a variety of conditions and variables. It should be understood that various alternatives to the embodiments of the invention described herein may be employed in practicing the invention. It is therefore contemplated that the invention shall also cover any such alternatives, modifications, variations or equivalents. It is intended that the following claims define the scope of the invention and that methods and structures within the scope of these claims and their equivalents be covered thereby.

The application's sequence listing, which the Patent Office published only in electronic form, follows.

SEQUENCE LISTING (2069 sequences)

SEQ ID NO: 1 - DNA, 104 bp, synthetic construct
  source 1..104: mol_type = other DNA
gtgtgacacatacatgttttagagctaccgtcgttgtaccgtctacttgacttttttttcagccaactccaattttttttgtcaagtagacggtacaacgacgg

SEQ ID NO: 2 - DNA, 103 bp, synthetic construct
  source 1..103: mol_type = other DNA
gggcggccgacagggttttagagctaccgtcgttgtaccgtctacttgacttttttttcagccaactccaattttttttgtcaagtagacggtacaacgacgg

SEQ ID NO: 3 - DNA, 103 bp, synthetic construct
  source 1..103: mol_type = other DNA
gtgcccggactctggttttagagctaccgtcgttgtaccgtctacttgacttttttttcagccaactccaattttttttgtcaagtagacggtacaacgacgg

SEQ ID NO: 4 - DNA, 104 bp, synthetic construct
  source 1..104: mol_type = other DNA
gccctggctccggacgttttagagctaccgtcgttgtaccgtctacttgacttttttttcagccaactccaattttttttgtcaagtagacggtacaacgacgg

SEQ ID NO: 5 - DNA, 104 bp, synthetic construct
  source 1..104: mol_type = other DNA
gtgtgacacatacatgttttagagctaccttcccgacttccgtaggagcgcttttttttcagccaactccaattttttttgcgctcctacggaagtcgggaagg

SEQ ID NO: 6 - DNA, 103 bp, synthetic construct
  source 1..103: mol_type = other DNA
gggcggccgacagggttttagagctaccttcccgacttccgtaggagcgcttttttttcagccaactccaattttttttgcgctcctacggaagtcgggaagg

SEQ ID NO: 7 - DNA, 103 bp, synthetic construct
  source 1..103: mol_type = other DNA
gtgcccggactctggttttagagctaccttcccgacttccgtaggagcgcttttttttcagccaactccaattttttttgcgctcctacggaagtcgggaagg

SEQ ID NO: 8 - DNA, 104 bp, synthetic construct
  source 1..104: mol_type = other DNA
gccctggctccggacgttttagagctaccttcccgacttccgtaggagcgcttttttttcagccaactccaattttttttgcgctcctacggaagtcgggaagg

SEQ ID NO: 9 - DNA, 104 bp, synthetic construct
  source 1..104: mol_type = other DNA
gtgtgacacatacatgttttagagctacctgaaggtaaagatcgggtcctcttttttttcagccaactccaattttttttgaggacccgatctttaccttcagg

SEQ ID NO: 10 - DNA, 103 bp, synthetic construct
  source 1..103: mol_type = other DNA
gggcggccgacagggttttagagctacctgaaggtaaagatcgggtcctcttttttttcagccaactccaattttttttgaggacccgatctttaccttcagg

SEQ ID NO: 11 - DNA, 103 bp, synthetic construct
  source 1..103: mol_type = other DNA
gtgcccggactctggttttagagctacctgaaggtaaagatcgggtcctcttttttttcagccaactccaattttttttgaggacccgatctttaccttcagg

SEQ ID NO: 12 - DNA, 104 bp, synthetic construct
  source 1..104: mol_type = other DNA
gccctggctccggacgttttagagctacctgaaggtaaagatcgggtcctcttttttttcagccaactccaattttttttgaggacccgatctttaccttcagg

SEQ ID NO: 13 - DNA, 102 bp, synthetic construct
  source 1..102: mol_type = other DNA
gtgtgacacatacatgttttagagctacctggttatagcggacgcactgtttttttttcagccaactccaattttttttacagtgcgtccgctataaccagg

SEQ ID NO: 14 - DNA, 101 bp, synthetic construct
  source 1..101: mol_type = other DNA
gggcggccgacagggttttagagctacctggttatagcggacgcactgtttttttttcagccaactccaattttttttacagtgcgtccgctataaccagg

SEQ ID NO: 15 - DNA, 101 bp, synthetic construct
  source 1..101: mol_type = other DNA
gtgcccggactctggttttagagctacctggttatagcggacgcactgtttttttttcagccaactccaattttttttacagtgcgtccgctataaccagg

SEQ ID NO: 16 - DNA, 102 bp, synthetic construct
  source 1..102: mol_type = other DNA
gccctggctccggacgttttagagctacctggttatagcggacgcactgtttttttttcagccaactccaattttttttacagtgcgtccgctataaccagg

SEQ ID NO: 17 - DNA, 102 bp, synthetic construct
  source 1..102: mol_type = other DNA
gtgtgacacatacatgttttagagctaccgcatcgtattatctgcgaagcttttttttcagccaactccaattttttttgcttcgcagataatacgatgcgg

SEQ ID NO: 18 - DNA, 101 bp, synthetic construct
  source 1..101: mol_type = other DNA
gggcggccgacagggttttagagctaccgcatcgtattatctgcgaagcttttttttcagccaactccaattttttttgcttcgcagataatacgatgcgg

SEQ ID NO: 19 - DNA, 101 bp, synthetic construct
  source 1..101: mol_type = other DNA
gtgcccggactctggttttagagctaccgcatcgtattatctgcgaagcttttttttcagccaactccaattttttttgcttcgcagataatacgatgcgg

SEQ ID NO: 20 - DNA, 102 bp, synthetic construct
  source 1..102: mol_type = other DNA
gccctggctccggacgttttagagctaccgcatcgtattatctgcgaagcttttttttcagccaactccaattttttttgcttcgcagataatacgatgcgg

SEQ ID NO: 21 - DNA, 102 bp, synthetic construct
  source 1..102: mol_type = other DNA
gtgtgacacatacatgttttagagctaccgctaggacgttcaacggagtcttttttttcagccaactccaattttttttgactccgttgaacgtcctagcgg

SEQ ID NO: 22 - DNA, 101 bp, synthetic construct
  source 1..101: mol_type = other DNA
gggcggccgacagggttttagagctaccgctaggacgttcaacggagtcttttttttcagccaactccaattttttttgactccgttgaacgtcctagcgg

SEQ ID NO: 23 - DNA, 101 bp, synthetic construct
  source 1..101: mol_type = other DNA
gtgcccggactctggttttagagctaccgctaggacgttcaacggagtcttttttttcagccaactccaattttttttgactccgttgaacgtcctagcgg

SEQ ID NO: 24 - DNA, 102 bp, synthetic construct
  source 1..102: mol_type = other DNA
gccctggctccggacgttttagagctaccgctaggacgttcaacggagtcttttttttcagccaactccaattttttttgactccgttgaacgtcctagcgg

SEQ ID NO: 25 - DNA, 102 bp, synthetic construct
  source 1..102: mol_type = other DNA
gtgtgacacatacatgttttagagctaccatagcggtactatcggcatctttttttttcagccaactccaattttttttagatgccgatagtaccgctatgg

SEQ ID NO: 26 - DNA, 101 bp, synthetic construct
  source 1..101: mol_type = other DNA
gggcggccgacagggttttagagctaccatagcggtactatcggcatctttttttttcagccaactccaattttttttagatgccgatagtaccgctatgg

SEQ ID NO: 27 - DNA, 101 bp, synthetic construct
  source 1..101: mol_type = other DNA
gtgcccggactctggttttagagctaccatagcggtactatcggcatctttttttttcagccaactccaattttttttagatgccgatagtaccgctatgg

SEQ ID NO: 28 - DNA, 102 bp, synthetic construct
  source 1..102: mol_type = other DNA
gccctggctccggacgttttagagctaccatagcggtactatcggcatctttttttttcagccaactccaattttttttagatgccgatagtaccgctatgg

SEQ ID NO: 29 - DNA, 102 bp, synthetic construct
  source 1..102: mol_type = other DNA
gtgtgacacatacatgttttagagctacctcgtactagtctcgcatgaccttttttttcagccaactccaattttttttggtcatgcgagactagtacgagg

SEQ ID NO: 30 - DNA, 101 bp, synthetic construct
  source 1..101: mol_type = other DNA
gggcggccgacagggttttagagctacctcgtactagtctcgcatgaccttttttttcagccaactccaattttttttggtcatgcgagactagtacgagg

SEQ ID NO: 31 - DNA, 101 bp, synthetic construct
  source 1..101: mol_type = other DNA
gtgcccggactctggttttagagctacctcgtactagtctcgcatgaccttttttttcagccaactccaattttttttggtcatgcgagactagtacgagg

SEQ ID NO: 32 - DNA, 102 bp, synthetic construct
  source 1..102: mol_type = other DNA
gccctggctccggacgttttagagctacctcgtactagtctcgcatgaccttttttttcagccaactccaattttttttggtcatgcgagactagtacgagg

SEQ ID NO: 33 - DNA, 102 bp, synthetic construct
  source 1..102: mol_type = other DNA
gtgtgacacatacatgttttagagctaccgatagtgctaaacgacgctttttttttttcagccaactccaattttttttaaagcgtcgtttagcactatcgg

SEQ ID NO: 34 - DNA, 101 bp, synthetic construct
  source 1..101: mol_type = other DNA
gggcggccgacagggttttagagctaccgatagtgctaaacgacgctttttttttttcagccaactccaattttttttaaagcgtcgtttagcactatcgg

SEQ ID NO: 35 - DNA, 101 bp, synthetic construct
  source 1..101: mol_type = other DNA
gtgcccggactctggttttagagctaccgatagtgctaaacgacgctttttttttttcagccaactccaattttttttaaagcgtcgtttagcactatcgg

SEQ ID NO: 36 - DNA, 102 bp, synthetic construct
  source 1..102: mol_type = other DNA
gccctggctccggacgttttagagctaccgatagtgctaaacgacgctttttttttttcagccaactccaattttttttaaagcgtcgtttagcactatcgg

SEQ ID NO: 37 - DNA, 102 bp, synthetic construct
  source 1..102: mol_type = other DNA
gtgtgacacatacatgttttagagctacccgttatcgacgttcaaggaacttttttttcagccaactccaattttttttgttccttgaacgtcgataacggg

SEQ ID NO: 38 - DNA, 101 bp, synthetic construct
  source 1..101: mol_type = other DNA
gggcggccgacagggttttagagctacccgttatcgacgttcaaggaacttttttttcagccaactccaattttttttgttccttgaacgtcgataacggg

SEQ ID NO: 39 - DNA, 101 bp, synthetic construct
  source 1..101: mol_type = other DNA
gtgcccggactctggttttagagctacccgttatcgacgttcaaggaacttttttttcagccaactccaattttttttgttccttgaacgtcgataacggg

SEQ ID NO: 40 - DNA, 102 bp, synthetic construct
  source 1..102: mol_type = other DNA
gccctggctccggacgttttagagctacccgttatcgacgttcaaggaacttttttttcagccaactccaattttttttgttccttgaacgtcgataacggg

SEQ ID NO: 41 - DNA, 102 bp, synthetic construct
  source 1..102: mol_type = other DNA
gtgtgacacatacatgttttagagctaccgatcaatgcggtctgcgtaacttttttttcagccaactccaattttttttgttacgcagaccgcattgatcgg

SEQ ID NO: 42 - DNA, 101 bp, synthetic construct
  source 1..101: mol_type = other DNA
gggcggccgacagggttttagagctaccgatcaatgcggtctgcgtaacttttttttcagccaactccaattttttttgttacgcagaccgcattgatcgg

SEQ ID NO: 43 - DNA, 101 bp, synthetic construct
  source 1..101: mol_type = other DNA
gtgcccggactctggttttagagctaccgatcaatgcggtctgcgtaacttttttttcagccaactccaattttttttgttacgcagaccgcattgatcgg

SEQ ID NO: 44 - DNA, 102 bp, synthetic construct
  source 1..102: mol_type = other DNA
gccctggctccggacgttttagagctaccgatcaatgcggtctgcgtaacttttttttcagccaactccaattttttttgttacgcagaccgcattgatcgg

SEQ ID NO: 45 - DNA, 102 bp, synthetic construct
  source 1..102: mol_type = other DNA
gtgtgacacatacatgttttagagctacccttactcgcgatactctcgacttttttttcagccaactccaattttttttgtcgagagtatcgcgagtaaggg

SEQ ID NO: 46 - DNA, 101 bp, synthetic construct
  source 1..101: mol_type = other DNA
gggcggccgacagggttttagagctacccttactcgcgatactctcgacttttttttcagccaactccaattttttttgtcgagagtatcgcgagtaaggg

SEQ ID NO: 47 - DNA, 101 bp, synthetic construct
  source 1..101: mol_type = other DNA
gtgcccggactctggttttagagctacccttactcgcgatactctcgacttttttttcagccaactccaattttttttgtcgagagtatcgcgagtaaggg

SEQ ID NO: 48 - DNA, 102 bp, synthetic construct
  source 1..102: mol_type = other DNA
gccctggctccggacgttttagagctacccttactcgcgatactctcgacttttttttcagccaactccaattttttttgtcgagagtatcgcgagtaaggg

SEQ ID NO: 49 - DNA, 102 bp, synthetic construct
  source 1..102: mol_type = other DNA
gtgtgacacatacatgttttagagctaccgcggacggtaagcacggaatattttttttcagccaactccaatttttttttattccgtgcttaccgtccgcgg

SEQ ID NO: 50 - DNA, 101 bp, synthetic construct
  source 1..101: mol_type = other DNA
gggcggccgacagggttttagagctaccgcggacggtaagcacggaatattttttttcagccaactccaatttttttttattccgtgcttaccgtccgcgg

SEQ ID NO: 51 - DNA, 101 bp, synthetic construct
  source 1..101: mol_type = other DNA
gtgcccggactctggttttagagctaccgcggacggtaagcacggaatattttttttcagccaactccaatttttttttattccgtgcttaccgtccgcgg

SEQ ID NO: 52 - DNA, 102 bp, synthetic construct
  source 1..102: mol_type = other DNA
gccctggctccggacgttttagagctaccgcggacggtaagcacggaatattttttttcagccaactccaatttttttttattccgtgcttaccgtccgcgg

SEQ ID NO: 53 - DNA, 102 bp, synthetic construct
  source 1..102: mol_type = other DNA
gtgtgacacatacatgttttagagctacctatagtcacgaatcgtagggtttttttttcagccaactccaattttttttaccctacgattcgtgactatagg

SEQ ID NO: 54 - DNA, 101 bp, synthetic construct
  source 1..101: mol_type = other DNA
gggcggccgacagggttttagagctacctatagtcacgaatcgtagggtttttttttcagccaactccaattttttttaccctacgattcgtgactatagg

SEQ ID NO: 55 - DNA, 101 bp, synthetic construct
  source 1..101: mol_type = other DNA
gtgcccggactctggttttagagctacctatagtcacgaatcgtagggtttttttttcagccaactccaattttttttaccctacgattcgtgactatagg

SEQ ID NO: 56 - DNA, 102 bp, synthetic construct
  source 1..102: mol_type = other DNA
gccctggctccggacgttttagagctacctatagtcacgaatcgtagggtttttttttcagccaactccaattttttttaccctacgattcgtgactatagg

SEQ ID NO: 57 - DNA, 102 bp, synthetic construct
  source 1..102: mol_type = other DNA
gtgtgacacatacatgttttagagctacccgtcgtcacgtatgcgtagcattttttttcagccaactccaatttttttttgctacgcatacgtgacgacggg

SEQ ID NO: 58 - DNA, 101 bp, synthetic construct
  source 1..101: mol_type = other DNA
gggcggccgacagggttttagagctacccgtcgtcacgtatgcgtagcattttttttcagccaactccaatttttttttgctacgcatacgtgacgacggg

SEQ ID NO: 59 - DNA, 101 bp, synthetic construct
  source 1..101: mol_type = other DNA
gtgcccggactctggttttagagctacccgtcgtcacgtatgcgtagcattttttttcagccaactccaatttttttttgctacgcatacgtgacgacggg

SEQ ID NO: 60 - DNA, 102 bp, synthetic construct
  source 1..102: mol_type = other DNA
gccctggctccggacgttttagagctacccgtcgtcacgtatgcgtagcattttttttcagccaactccaatttttttttgctacgcatacgtgacgacggg

SEQ ID NO: 61 - DNA, 102 bp, synthetic construct
  source 1..102: mol_type = other DNA
gtgtgacacatacatgttttagagctacccgagaggtagtagacgacgcattttttttcagccaactccaatttttttttgcgtcgtctactacctctcggg

SEQ ID NO: 62 - DNA, 101 bp, synthetic construct
  source 1..101: mol_type = other DNA
gggcggccgacagggttttagagctacccgagaggtagtagacgacgcattttttttcagccaactccaatttttttttgcgtcgtctactacctctcggg

SEQ ID NO: 63 - DNA, 101 bp, synthetic construct
  source 1..101: mol_type = other DNA
gtgcccggactctggttttagagctacccgagaggtagtagacgacgcattttttttcagccaactccaatttttttttgcgtcgtctactacctctcggg

SEQ ID NO: 64 - DNA, 102 bp, synthetic construct
  source 1..102: mol_type = other DNA
gccctggctccggacgttttagagctacccgagaggtagtagacgacgcattttttttcagccaactccaatttttttttgcgtcgtctactacctctcggg

SEQ ID NO: 65 - DNA, 102 bp, synthetic construct
  source 1..102: mol_type = other DNA
gtgtgacacatacatgttttagagctaccgacgtctacggacgggagctattttttttcagccaactccaatttttttttagctcccgtccgtagacgtcgg

SEQ ID NO: 66 - DNA, 101 bp, synthetic construct
  source 1..101: mol_type = other DNA
gggcggccgacagggttttagagctaccgacgtctacggacgggagctattttttttcagccaactccaatttttttttagctcccgtccgtagacgtcgg

SEQ ID NO: 67 - DNA, 101 bp, synthetic construct
  source 1..101: mol_type = other DNA
gtgcccggactctggttttagagctaccgacgtctacggacgggagctattttttttcagccaactccaatttttttttagctcccgtccgtagacgtcgg

SEQ ID NO: 68 - DNA, 102 bp, synthetic construct
  source 1..102: mol_type = other DNA
gccctggctccggacgttttagagctaccgacgtctacggacgggagctattttttttcagccaactccaatttttttttagctcccgtccgtagacgtcgg

SEQ ID NO: 69 - DNA, 102 bp, synthetic construct
  source 1..102: mol_type = other DNA
gtgtgacacatacatgttttagagctaccaaagctcattcgcgactgagcttttttttcagccaactccaattttttttgctcagtcgcgaatgagctttgg

SEQ ID NO: 70 - DNA, 101 bp, synthetic construct
  source 1..101: mol_type = other DNA
gggcggccgacagggttttagagctaccaaagctcattcgcgactgagcttttttttcagccaactccaattttttttgctcagtcgcgaatgagctttgg

SEQ ID NO: 71 - DNA, 101 bp, synthetic construct
  source 1..101: mol_type = other DNA
gtgcccggactctggttttagagctaccaaagctcattcgcgactgagcttttttttcagccaactccaattttttttgctcagtcgcgaatgagctttgg

SEQ ID NO: 72 - DNA, 102 bp, synthetic construct
  source 1..102: mol_type = other DNA
gccctggctccggacgttttagagctaccaaagctcattcgcgactgagcttttttttcagccaactccaattttttttgctcagtcgcgaatgagctttgg

SEQ ID NO: 73 - DNA, 102 bp, synthetic construct
  source 1..102: mol_type = other DNA
gtgtgacacatacatgttttagagctaccatggcacgatcgacacggaggttttttttcagccaactccaattttttttcctccgtgtcgatcgtgccatgg

SEQ ID NO: 74 - DNA, 101 bp, synthetic construct
  source 1..101: mol_type = other DNA
gggcggccgacagggttttagagctaccatggcacgatcgacacggaggttttttttcagccaactccaattttttttcctccgtgtcgatcgtgccatgg

SEQ ID NO: 75 - DNA, 101 bp, synthetic construct
  source 1..101: mol_type = other DNA
gtgcccggactctggttttagagctaccatggcacgatcgacacggaggttttttttcagccaactccaattttttttcctccgtgtcgatcgtgccatgg

SEQ ID NO: 76 - DNA, 102 bp, synthetic construct
  source 1..102: mol_type = other DNA
gccctggctccggacgttttagagctaccatggcacgatcgacacggaggttttttttcagccaactccaattttttttcctccgtgtcgatcgtgccatgg

SEQ ID NO: 77 - DNA, 102 bp, synthetic construct
  source 1..102: mol_type = other DNA
gtgtgacacatacatgttttagagctacccgaactctctatcgaacgagtttttttttcagccaactccaattttttttactcgttcgatagagagttcggg

SEQ ID NO: 78 - DNA, 101 bp, synthetic construct
  source 1..101: mol_type = other DNA
gggcggccgacagggttttagagctacccgaactctctatcgaacgagtttttttttcagccaactccaattttttttactcgttcgatagagagttcggg

SEQ ID NO: 79 - DNA, 101 bp, synthetic construct
  source 1..101: mol_type = other DNA
gtgcccggactctggttttagagctacccgaactctctatcgaacgagtttttttttcagccaactccaattttttttactcgttcgatagagagttcggg

SEQ ID NO: 80 - DNA, 102 bp, synthetic construct
  source 1..102: mol_type = other DNA
gccctggctccggacgttttagagctacccgaactctctatcgaacgagtttttttttcagccaactccaattttttttactcgttcgatagagagttcggg

SEQ ID NO: 81 - DNA, 102 bp, synthetic construct
  source 1..102: mol_type = other DNA
gtgtgacacatacatgttttagagctacctacacgatagtggtcgtgcgcttttttttcagccaactccaattttttttgcgcacgaccactatcgtgtagg

SEQ ID NO: 82 - DNA, 101 bp, synthetic construct
  source 1..101: mol_type = other DNA
gggcggccgacagggttttagagctacctacacgatagtggtcgtgcgcttttttttcagccaactccaattttttttgcgcacgaccactatcgtgtagg

SEQ ID NO: 83 - DNA, 101 bp, synthetic construct
  source 1..101: mol_type = other DNA
gtgcccggactctggttttagagctacctacacgatagtggtcgtgcgcttttttttcagccaactccaattttttttgcgcacgaccactatcgtgtagg

SEQ ID NO: 84 - DNA, 102 bp, synthetic construct
  source 1..102: mol_type = other DNA
gccctggctccggacgttttagagctacctacacgatagtggtcgtgcgcttttttttcagccaactccaattttttttgcgcacgaccactatcgtgtagg

SEQ ID NO: 85 - DNA, 102 bp, synthetic construct
  source 1..102: mol_type = other DNA
gtgtgacacatacatgttttagagctaccctggcggaacgttcgagtaatttttttttcagccaactccaattttttttattactcgaacgttccgccaggg

SEQ ID NO: 86 - DNA, 101 bp, synthetic construct
  source 1..101: mol_type = other DNA
gggcggccgacagggttttagagctaccctggcggaacgttcgagtaatttttttttcagccaactccaattttttttattactcgaacgttccgccaggg

SEQ ID NO: 87 - DNA, 101 bp, synthetic construct
  source 1..101: mol_type = other DNA
gtgcccggactctggttttagagctaccctggcggaacgttcgagtaatttttttttcagccaactccaattttttttattactcgaacgttccgccaggg

SEQ ID NO: 88 - DNA, 102 bp, synthetic construct
  source 1..102: mol_type = other DNA
gccctggctccggacgttttagagctaccctggcggaacgttcgagtaatttttttttcagccaactccaattttttttattactcgaacgttccgccaggg

SEQ ID NO: 89 - DNA, 102 bp, synthetic construct
  source 1..102: mol_type = other DNA
gtgtgacacatacatgttttagagctacctacactcgacatcggtagctattttttttcagccaactccaatttttttttagctaccgatgtcgagtgtagg

SEQ ID NO: 90 - DNA, 101 bp, synthetic construct
  source 1..101: mol_type = other DNA
gggcggccgacagggttttagagctacctacactcgacatcggtagctattttttttcagccaactccaatttttttttagctaccgatgtcgagtgtagg

SEQ ID NO: 91 - DNA, 101 bp, synthetic construct
  source 1..101: mol_type = other DNA
gtgcccggactctggttttagagctacctacactcgacatcggtagctattttttttcagccaactccaatttttttttagctaccgatgtcgagtgtagg

SEQ ID NO: 92 - DNA, 102 bp, synthetic construct
  source 1..102: mol_type = other DNA
gccctggctccggacgttttagagctacctacactcgacatcggtagctattttttttcagccaactccaatttttttttagctaccgatgtcgagtgtagg

SEQ ID NO: 93 - DNA, 104 bp, synthetic construct
  source 1..104: mol_type = other DNA
gcgccagcctcgaaagttttagagctaccgtcgttgtaccgtctacttgacttttttttcagccaactccaattttttttgtcaagtagacggtacaacgacgg

SEQ ID NO: 94 - DNA, 103 bp, synthetic construct
  source 1..103: mol_type = other DNA
gaaccgcccgccccgttttagagctaccgtcgttgtaccgtctacttgacttttttttcagccaactccaattttttttgtcaagtagacggtacaacgacgg

SEQ ID NO: 95 - DNA, 104 bp, synthetic construct
  source 1..104: mol_type = other DNA
gcggcgcactagggggttttagagctaccgtcgttgtaccgtctacttgacttttttttcagccaactccaattttttttgtcaagtagacggtacaacgacgg

SEQ ID NO: 96 - DNA, 103 bp, synthetic construct
  source 1..103: mol_type = other DNA
gccccgggtttggggttttagagctaccgtcgttgtaccgtctacttgacttttttttcagccaactccaattttttttgtcaagtagacggtacaacgacgg

SEQ ID NO: 97 - DNA, 104 bp, synthetic construct
  source 1..104: mol_type = other DNA
gcgccagcctcgaaagttttagagctaccttcccgacttccgtaggagcgcttttttttcagccaactccaattttttttgcgctcctacggaagtcgggaagg

SEQ ID NO: 98 - DNA, 103 bp, synthetic construct
  source 1..103: mol_type = other DNA
gaaccgcccgccccgttttagagctaccttcccgacttccgtaggagcgcttttttttcagccaactccaattttttttgcgctcctacggaagtcgggaagg

SEQ ID NO: 99 - DNA, 104 bp, synthetic construct
  source 1..104: mol_type = other DNA
gcggcgcactagggggttttagagctaccttcccgacttccgtaggagcgcttttttttcagccaactccaattttttttgcgctcctacggaagtcgggaagg

SEQ ID NO: 100 - DNA, 103 bp, synthetic construct
  source 1..103: mol_type = other DNA
gccccgggtttggggttttagagctaccttcccgacttccgtaggagcgcttttttttcagccaactccaattttttttgcgctcctacggaagtcgggaagg

SEQ ID NO: 101 - DNA, 104 bp, synthetic construct
  source 1..104: mol_type = other DNA
gcgccagcctcgaaagttttagagctacctgaaggtaaagatcgggtcctcttttttttcagccaactccaattttttttgaggacccgatctttaccttcagg

SEQ ID NO: 102 - DNA, 103 bp, synthetic construct
  source 1..103: mol_type = other DNA
gaaccgcccgccccgttttagagctacctgaaggtaaagatcgggtcctcttttttttcagccaactccaattttttttgaggacccgatctttaccttcagg

SEQ ID NO: 103 - DNA, 104 bp, synthetic construct
  source 1..104: mol_type = other DNA
gcggcgcactagggggttttagagctacctgaaggtaaagatcgggtcctcttttttttcagccaactccaattttttttgaggacccgatctttaccttcagg

SEQ ID NO: 104 - DNA, 103 bp, synthetic construct
  source 1..103: mol_type = other DNA
gccccgggtttggggttttagagctacctgaaggtaaagatcgggtcctcttttttttcagccaactccaattttttttgaggacccgatctttaccttcagg

SEQ ID NO: 105 - DNA, 102 bp, synthetic construct
  source 1..102: mol_type = other DNA
gcgccagcctcgaaagttttagagctacctggttatagcggacgcactgtttttttttcagccaactccaattttttttacagtgcgtccgctataaccagg

SEQ ID NO: 106 - DNA, 101 bp, synthetic construct
  source 1..101: mol_type = other DNA
gaaccgcccgccccgttttagagctacctggttatagcggacgcactgtttttttttcagccaactccaattttttttacagtgcgtccgctataaccagg

SEQ ID NO: 107 - DNA, 102 bp, synthetic construct
  source 1..102: mol_type = other DNA
gcggcgcactagggggttttagagctacctggttatagcggacgcactgtttttttttcagccaactccaattttttttacagtgcgtccgctataaccagg

SEQ ID NO: 108 - DNA, 101 bp, synthetic construct
  source 1..101: mol_type = other DNA
gccccgggtttggggttttagagctacctggttatagcggacgcactgtttttttttcagccaactccaattttttttacagtgcgtccgctataaccagg

SEQ ID NO: 109 - DNA, 102 bp, synthetic construct
  source 1..102: mol_type = other DNA
gcgccagcctcgaaagttttagagctaccgcatcgtattatctgcgaagcttttttttcagccaactccaattttttttgcttcgcagataatacgatgcgg

SEQ ID NO: 110 - DNA, 101 bp, synthetic construct
  source 1..101: mol_type = other DNA
gaaccgcccgccccgttttagagctaccgcatcgtattatctgcgaagcttttttttcagccaactccaattttttttgcttcgcagataatacgatgcgg

SEQ ID NO: 111 - DNA, 102 bp, synthetic construct
  source 1..102: mol_type = other DNA
gcggcgcactagggggttttagagctaccgcatcgtattatctgcgaagcttttttttcagccaactccaattttttttgcttcgcagataatacgatgcgg

SEQ ID NO: 112 - DNA, 101 bp, synthetic construct
  source 1..101: mol_type = other DNA
gccccgggtttggggttttagagctaccgcatcgtattatctgcgaagcttttttttcagccaactccaattttttttgcttcgcagataatacgatgcgg

SEQ ID NO: 113 - DNA, 102 bp, synthetic construct
  source 1..102: mol_type = other DNA
gcgccagcctcgaaagttttagagctaccgctaggacgttcaacggagtcttttttttcagccaactccaattttttttgactccgttgaacgtcctagcgg

SEQ ID NO: 114 - DNA, 101 bp, synthetic construct
  source 1..101: mol_type = other DNA
gaaccgcccgccccgttttagagctaccgctaggacgttcaacggagtcttttttttcagccaactccaattttttttgactccgttgaacgtcctagcgg

SEQ ID NO: 115 - DNA, 102 bp, synthetic construct
  source 1..102: mol_type = other DNA
gcggcgcactagggggttttagagctaccgctaggacgttcaacggagtcttttttttcagccaactccaattttttttgactccgttgaacgtcctagcgg

SEQ ID NO: 116 - DNA, 101 bp, synthetic construct
  source 1..101: mol_type = other DNA
gccccgggtttggggttttagagctaccgctaggacgttcaacggagtcttttttttcagccaactccaattttttttgactccgttgaacgtcctagcgg

SEQ ID NO: 117 - DNA, 102 bp, synthetic construct
  source 1..102: mol_type = other DNA
gcgccagcctcgaaagttttagagctaccatagcggtactatcggcatctttttttttcagccaactccaattttttttagatgccgatagtaccgctatgg

SEQ ID NO: 118 - DNA, 101 bp, synthetic construct
  source 1..101: mol_type = other DNA
gaaccgcccgccccgttttagagctaccatagcggtactatcggcatctttttttttcagccaactccaattttttttagatgccgatagtaccgctatgg

SEQ ID NO: 119 - DNA, 102 bp, synthetic construct
  source 1..102: mol_type = other DNA
gcggcgcactagggggttttagagctaccatagcggtactatcggcatctttttttttcagccaactccaattttttttagatgccgatagtaccgctatgg

SEQ ID NO: 120 - DNA, 101 bp, synthetic construct
  source 1..101: mol_type = other DNA
gccccgggtttggggttttagagctaccatagcggtactatcggcatctttttttttcagccaactccaattttttttagatgccgatagtaccgctatgg

SEQ ID NO: 121 - DNA, 102 bp, synthetic construct
  source 1..102: mol_type = other DNA
gcgccagcctcgaaagttttagagctacctcgtactagtctcgcatgaccttttttttcagccaactccaattttttttggtcatgcgagactagtacgagg

SEQ ID NO: 122 - DNA, 101 bp, synthetic construct
  source 1..101: mol_type = other DNA
gaaccgcccgccccgttttagagctacctcgtactagtctcgcatgaccttttttttcagccaactccaattttttttggtcatgcgagactagtacgagg

SEQ ID NO: 123 - DNA, 102 bp, synthetic construct
  source 1..102: mol_type = other DNA
gcggcgcactagggggttttagagctacctcgtactagtctcgcatgaccttttttttcagccaactccaattttttttggtcatgcgagactagtacgagg

SEQ ID NO: 124 - DNA, 101 bp, synthetic construct
  source 1..101: mol_type = other DNA
gccccgggtttggggttttagagctacctcgtactagtctcgcatgaccttttttttcagccaactccaattttttttggtcatgcgagactagtacgagg

SEQ ID NO: 125 - DNA, 102 bp, synthetic construct
  source 1..102: mol_type = other DNA
gcgccagcctcgaaagttttagagctaccgatagtgctaaacgacgctttttttttttcagccaactccaattttttttaaagcgtcgtttagcactatcgg

SEQ ID NO: 126 - DNA, 101 bp, synthetic construct
  source 1..101: mol_type = other DNA
gaaccgcccgccccgttttagagctaccgatagtgctaaacgacgctttttttttttcagccaactccaattttttttaaagcgtcgtttagcactatcgg

SEQ ID NO: 127 - DNA, 102 bp, synthetic construct
  source 1..102: mol_type = other DNA
gcggcgcactagggggttttagagctaccgatagtgctaaacgacgctttttttttttcagccaactccaattttttttaaagcgtcgtttagcactatcgg

SEQ ID NO: 128 - DNA, 101 bp, synthetic construct
  source 1..101: mol_type = other DNA
gccccgggtttggggttttagagctaccgatagtgctaaacgacgctttttttttttcagccaactccaattttttttaaagcgtcgtttagcactatcgg

SEQ ID NO: 129 - DNA, 102 bp, synthetic construct
  source 1..102: mol_type = other DNA
gcgccagcctcgaaagttttagagctacccgttatcgacgttcaaggaacttttttttcagccaactccaattttttttgttccttgaacgtcgataacggg

SEQ ID NO: 130 - DNA, 101 bp, synthetic construct
  source 1..101: mol_type = other DNA
gaaccgcccgccccgttttagagctacccgttatcgacgttcaaggaacttttttttcagccaactccaattttttttgttccttgaacgtcgataacggg

SEQ ID NO: 131 - DNA, 102 bp, synthetic construct
  source 1..102: mol_type = other DNA
gcggcgcactagggggttttagagctacccgttatcgacgttcaaggaacttttttttcagccaactccaattttttttgttccttgaacgtcgataacggg

SEQ ID NO: 132 - DNA, 101 bp, synthetic construct
  source 1..101: mol_type = other DNA
gccccgggtttggggttttagagctacccgttatcgacgttcaaggaacttttttttcagccaactccaattttttttgttccttgaacgtcgataacggg

SEQ ID NO: 133 - DNA, 102 bp, synthetic construct
  source 1..102: mol_type = other DNA
gcgccagcctcgaaagttttagagctaccgatcaatgcggtctgcgtaacttttttttcagccaactccaattttttttgttacgcagaccgcattgatcgg

SEQ ID NO: 134 - DNA, 101 bp, synthetic construct
  source 1..101: mol_type = other DNA
gaaccgcccgccccgttttagagctaccgatcaatgcggtctgcgtaacttttttttcagccaactccaattttttttgttacgcagaccgcattgatcgg

SEQ ID NO: 135 - DNA, 102 bp, synthetic construct
  source 1..102: mol_type = other DNA
gcggcgcactagggggttttagagctaccgatcaatgcggtctgcgtaacttttttttcagccaactccaattttttttgttacgcagaccgcattgatcgg

SEQ ID NO: 136 - DNA, 101 bp, synthetic construct
  source 1..101: mol_type = other DNA
gccccgggtttggggttttagagctaccgatcaatgcggtctgcgtaacttttttttcagccaactccaattttttttgttacgcagaccgcattgatcgg

SEQ ID NO: 137 - DNA, 102 bp, synthetic construct
  source 1..102: mol_type = other DNA
gcgccagcctcgaaagttttagagctacccttactcgcgatactctcgacttttttttcagccaactccaattttttttgtcgagagtatcgcgagtaaggg

SEQ ID NO: 138 - DNA, 101 bp, synthetic construct
  source 1..101: mol_type = other DNA
gaaccgcccgccccgttttagagctacccttactcgcgatactctcgacttttttttcagccaactccaattttttttgtcgagagtatcgcgagtaaggg

SEQ ID NO: 139 - DNA, 102 bp, synthetic construct
  source 1..102: mol_type = other DNA
gcggcgcactagggggttttagagctacccttactcgcgatactctcgacttttttttcagccaactccaattttttttgtcgagagtatcgcgagtaaggg

SEQ ID NO: 140 - DNA, 101 bp, synthetic construct
  source 1..101: mol_type = other DNA
gccccgggtttggggttttagagctacccttactcgcgatactctcgacttttttttcagccaactccaattttttttgtcgagagtatcgcgagtaaggg

SEQ ID NO: 141 - DNA, 102 bp, synthetic construct
  source 1..102: mol_type = other DNA
gcgccagcctcgaaagttttagagctaccgcggacggtaagcacggaatattttttttcagccaactccaatttttttttattccgtgcttaccgtccgcgg

SEQ ID NO: 142 - DNA, 101 bp, synthetic construct
  source 1..101: mol_type = other DNA
gaaccgcccgccccgttttagagctaccgcggacggtaagcacggaatattttttttcagccaactccaatttttttttattccgtgcttaccgtccgcgg

SEQ ID NO: 143 - DNA, 102 bp, synthetic construct
  source 1..102: mol_type = other DNA
gcggcgcactagggggttttagagctaccgcggacggtaagcacggaatattttttttcagccaactccaatttttttttattccgtgcttaccgtccgcgg

SEQ ID NO: 144 - DNA, 101 bp, synthetic construct
  source 1..101: mol_type = other DNA
gccccgggtttggggttttagagctaccgcggacggtaagcacggaatattttttttcagccaactccaatttttttttattccgtgcttaccgtccgcgg

SEQ ID NO: 145 - DNA, 102 bp, synthetic construct
  source 1..102: mol_type = other DNA
gcgccagcctcgaaagttttagagctacctatagtcacgaatcgtagggtttttttttcagccaactccaattttttttaccctacgattcgtgactatagg

SEQ ID NO: 146 - DNA, 101 bp, synthetic construct
  source 1..101: mol_type = other DNA
gaaccgcccgccccgttttagagctacctatagtcacgaatcgtagggtttttttttcagccaactccaattttttttaccctacgattcgtgactatagg

SEQ ID NO: 147 - DNA, 102 bp, synthetic construct
  source 1..102: mol_type = other DNA
gcggcgcactagggggttttagagctacctatagtcacgaatcgtagggtttttttttcagccaactccaattttttttaccctacgattcgtgactatagg

SEQ ID NO: 148 - DNA, 101 bp, synthetic construct
  source 1..101: mol_type = other DNA
gccccgggtttggggttttagagctacctatagtcacgaatcgtagggtttttttttcagccaactccaattttttttaccctacgattcgtgactatagg

SEQ ID NO: 149 - DNA, 102 bp, synthetic construct
  source 1..102: mol_type = other DNA
gcgccagcctcgaaagttttagagctacccgtcgtcacgtatgcgtagcattttttttcagccaactccaatttttttttgctacgcatacgtgacgacggg

SEQ ID NO: 150 - DNA, 101 bp, synthetic construct
  source 1..101: mol_type = other DNA
gaaccgcccgccccgttttagagctacccgtcgtcacgtatgcgtagcattttttttcagccaactccaatttttttttgctacgcatacgtgacgacggg

SEQ ID NO: 151 - DNA, 102 bp, synthetic construct
  source 1..102: mol_type = other DNA
gcggcgcactagggggttttagagctacccgtcgtcacgtatgcgtagcattttttttcagccaactccaatttttttttgctacgcatacgtgacgacggg

SEQ ID NO: 152 - DNA, 101 bp, synthetic construct
  source 1..101: mol_type = other DNA
gccccgggtttggggttttagagctacccgtcgtcacgtatgcgtagcattttttttcagccaactccaatttttttttgctacgcatacgtgacgacggg

SEQ ID NO: 153 - DNA, 102 bp, synthetic construct
  source 1..102: mol_type = other DNA
gcgccagcctcgaaagttttagagctacccgagaggtagtagacgacgcattttttttcagccaactccaatttttttttgcgtcgtctactacctctcggg

SEQ ID NO: 154 - DNA, 101 bp, synthetic construct
  source 1..101: mol_type = other DNA
gaaccgcccgccccgttttagagctacccgagaggtagtagacgacgcattttttttcagccaactccaatttttttttgcgtcgtctactacctctcggg

SEQ ID NO: 155 - DNA, 102 bp, synthetic construct
  source 1..102: mol_type = other DNA
gcggcgcactagggggttttagagctacccgagaggtagtagacgacgcattttttttcagccaactccaatttttttttgcgtcgtctactacctctcggg

SEQ ID NO: 156 - DNA, 101 bp, synthetic construct
  source 1..101: mol_type = other DNA
gccccgggtttggggttttagagctacccgagaggtagtagacgacgcattttttttcagccaactccaatttttttttgcgtcgtctactacctctcggg

SEQ ID NO: 157 - DNA, 102 bp, synthetic construct
  source 1..102: mol_type = other DNA
gcgccagcctcgaaagttttagagctaccgacgtctacggacgggagctattttttttcagccaactccaatttttttttagctcccgtccgtagacgtcgg

SEQ ID NO: 158 - DNA, 101 bp, synthetic construct
  source 1..101: mol_type = other DNA
gaaccgcccgccccgttttagagctaccgacgtctacggacgggagctattttttttcagccaactccaatttttttttagctcccgtccgtagacgtcgg

SEQ ID NO: 159 - DNA, 102 bp, synthetic construct
  source 1..102: mol_type = other DNA
gcggcgcactagggggttttagagctaccgacgtctacggacgggagctattttttttcagccaactccaatttttttttagctcccgtccgtagacgtcgg

SEQ ID NO: 160 - DNA, 101 bp, synthetic construct
  source 1..101: mol_type = other DNA
gccccgggtttggggttttagagctaccgacgtctacggacgggagctattttttttcagccaactccaatttttttttagctcccgtccgtagacgtcgg

SEQ ID NO: 161 - DNA, 102 bp, synthetic construct
  source 1..102: mol_type = other DNA
gcgccagcctcgaaagttttagagctaccaaagctcattcgcgactgagcttttttttcagccaactccaattttttttgctcagtcgcgaatgagctttgg

SEQ ID NO: 162 - DNA, 101 bp, synthetic construct
  source 1..101: mol_type = other DNA
gaaccgcccgccccgttttagagctaccaaagctcattcgcgactgagcttttttttcagccaactccaattttttttgctcagtcgcgaatgagctttgg

SEQ ID NO: 163 - DNA, 102 bp, synthetic construct
  source 1..102: mol_type = other DNA
gcggcgcactagggggttttagagctaccaaagctcattcgcgactgagcttttttttcagccaactccaattttttttgctcagtcgcgaatgagctttgg

SEQ ID NO: 164 - DNA, 101 bp, synthetic construct
  source 1..101: mol_type = other DNA
gccccgggtttggggttttagagctaccaaagctcattcgcgactgagcttttttttcagccaactccaattttttttgctcagtcgcgaatgagctttgg

SEQ ID NO: 165 - DNA, 102 bp, synthetic construct
  source 1..102: mol_type = other DNA
gcgccagcctcgaaagttttagagctaccatggcacgatcgacacggaggttttttttcagccaactccaattttttttcctccgtgtcgatcgtgccatgg

SEQ ID NO: 166 - DNA, 101 bp, synthetic construct
  source 1..101: mol_type = other DNA
gaaccgcccgccccgttttagagctaccatggcacgatcgacacggaggttttttttcagccaactccaattttttttcctccgtgtcgatcgtgccatgg

SEQ ID NO: 167 - DNA, 102 bp, synthetic construct
  source 1..102: mol_type = other DNA
gcggcgcactagggggttttagagctaccatggcacgatcgacacggaggttttttttcagccaactccaattttttttcctccgtgtcgatcgtgccatgg

SEQ ID NO: 168 - DNA, 101 bp, synthetic construct
  source 1..101: mol_type = other DNA
gccccgggtttggggttttagagctaccatggcacgatcgacacggaggttttttttcagccaactccaattttttttcctccgtgtcgatcgtgccatgg

SEQ ID NO: 169 - DNA, 102 bp, synthetic construct
  source 1..102: mol_type = other DNA
gcgccagcctcgaaagttttagagctacccgaactctctatcgaacgagtttttttttcagccaactccaattttttttactcgttcgatagagagttcggg

SEQ ID NO: 170 - DNA, 101 bp, synthetic construct
  source 1..101: mol_type = other DNA
gaaccgcccgccccgttttagagctacccgaactctctatcgaacgagtttttttttcagccaactccaattttttttactcgttcgatagagagttcggg

SEQ ID NO: 171 - DNA, 102 bp, synthetic construct
  source 1..102: mol_type = other DNA
gcggcgcactagggggttttagagctacccgaactctctatcgaacgagtttttttttcagccaactccaattttttttactcgttcgatagagagttcggg

SEQ ID NO: 172 - DNA, 101 bp, synthetic construct
  source 1..101: mol_type = other DNA
gccccgggtttggggttttagagctacccgaactctctatcgaacgagtttttttttcagccaactccaattttttttactcgttcgatagagagttcggg

SEQ ID NO: 173 - DNA, 102 bp, synthetic construct
  source 1..102: mol_type = other DNA
gcgccagcctcgaaagttttagagctacctacacgatagtggtcgtgcgcttttttttcagccaactccaattttttttgcgcacgaccactatcgtgtagg

SEQ ID NO: 174 - DNA, 101 bp, synthetic construct
  source 1..101: mol_type = other DNA
gaaccgcccgccccgttttagagctacctacacgatagtggtcgtgcgcttttttttcagccaactccaattttttttgcgcacgaccactatcgtgtagg

SEQ ID NO: 175 - DNA, 102 bp, synthetic construct
  source 1..102: mol_type = other DNA
gcggcgcactagggggttttagagctacctacacgatagtggtcgtgcgcttttttttcagccaactccaattttttttgcgcacgaccactatcgtgtagg

SEQ ID NO: 176 - DNA, 101 bp, synthetic construct
  source 1..101: mol_type = other DNA
gccccgggtttggggttttagagctacctacacgatagtggtcgtgcgcttttttttcagccaactccaattttttttgcgcacgaccactatcgtgtagg

SEQ ID NO: 177 - DNA, 102 bp, synthetic construct
  source 1..102: mol_type = other DNA
gcgccagcctcgaaagttttagagctaccctggcggaacgttcgagtaatttttttttcagccaactccaattttttttattactcgaacgttccgccaggg

SEQ ID NO: 178 - DNA, 101 bp, synthetic construct
  source 1..101: mol_type = other DNA
gaaccgcccgccccgttttagagctaccctggcggaacgttcgagtaatttttttttcagccaactccaattttttttattactcgaacgttccgccaggg

SEQ ID NO: 179 - DNA, 102 bp, synthetic construct
  source 1..102: mol_type = other DNA
gcggcgcactagggggttttagagctaccctggcggaacgttcgagtaatttttttttcagccaactccaattttttttattactcgaacgttccgccaggg

SEQ ID NO: 180 - DNA, 101 bp, synthetic construct
  source 1..101: mol_type = other DNA
gccccgggtttggggttttagagctaccctggcggaacgttcgagtaatttttttttcagccaactccaattttttttattactcgaacgttccgccaggg

SEQ ID NO: 181 - DNA, 102 bp, synthetic construct
  source 1..102: mol_type = other DNA
gcgccagcctcgaaagttttagagctacctacactcgacatcggtagctattttttttcagccaactccaatttttttttagctaccgatgtcgagtgtagg

SEQ ID NO: 182 - DNA, 101 bp, synthetic construct
  source 1..101: mol_type = other DNA
gaaccgcccgccccgttttagagctacctacactcgacatcggtagctattttttttcagccaactccaatttttttttagctaccgatgtcgagtgtagg

SEQ ID NO: 183 - DNA, 102 bp, synthetic construct
  source 1..102: mol_type = other DNA
gcggcgcactagggggttttagagctacctacactcgacatcggtagctattttttttcagccaactccaatttttttttagctaccgatgtcgagtgtagg

SEQ ID NO: 184 - DNA, 101 bp, synthetic construct
  source 1..101: mol_type = other DNA
gccccgggtttggggttttagagctacctacactcgacatcggtagctattttttttcagccaactccaatttttttttagctaccgatgtcgagtgtagg

SEQ ID NO: 185 - DNA, 104 bp, synthetic construct
  source 1..104: mol_type = other DNA
gccgcagcctagcttgttttagagctaccgtcgttgtaccgtctacttgacttttttttcagccaactccaattttttttgtcaagtagacggtacaacgacgg

SEQ ID NO: 186 - DNA, 104 bp, synthetic construct
  source 1..104: mol_type = other DNA
gtgacggacaggcgtgttttagagctaccgtcgttgtaccgtctacttgacttttttttcagccaactccaattttttttgtcaagtagacggtacaacgacgg

SEQ ID NO: 187 - DNA, 104 bp, synthetic construct
  source 1..104: mol_type = other DNA
gcggggccgcgtcctgttttagagctaccgtcgttgtaccgtctacttgacttttttttcagccaactccaattttttttgtcaagtagacggtacaacgacgg

SEQ ID NO: 188 - DNA, 104 bp, synthetic construct
  source 1..104: mol_type = other DNA
gcagaggcctttaaagttttagagctaccgtcgttgtaccgtctacttgacttttttttcagccaactccaattttttttgtcaagtagacggtacaacgacgg

SEQ ID NO: 189 - DNA, 104 bp, synthetic construct
  source 1..104: mol_type = other DNA
gccgcagcctagcttgttttagagctaccttcccgacttccgtaggagcgcttttttttcagccaactccaattttttttgcgctcctacggaagtcgggaagg

SEQ ID NO: 190 - DNA, 104 bp, synthetic construct
  source 1..104: mol_type = other DNA
gtgacggacaggcgtgttttagagctaccttcccgacttccgtaggagcgcttttttttcagccaactccaattttttttgcgctcctacggaagtcgggaagg

SEQ ID NO: 191 - DNA, 104 bp, synthetic construct
  source 1..104: mol_type = other DNA
gcggggccgcgtcctgttttagagctaccttcccgacttccgtaggagcgcttttttttcagccaactccaattttttttgcgctcctacggaagtcgggaagg

SEQ ID NO: 192 - DNA, 104 bp, synthetic construct
  source 1..104: mol_type = other DNA
gcagaggcctttaaagttttagagctaccttcccgacttccgtaggagcgcttttttttcagccaactccaattttttttgcgctcctacggaagtcgggaagg

SEQ ID NO: 193 - DNA, 104 bp, synthetic construct
  source 1..104: mol_type = other DNA
gccgcagcctagcttgttttagagctacctgaaggtaaagatcgggtcctcttttttttcagccaactccaattttttttgaggacccgatctttaccttcagg

SEQ ID NO: 194 - DNA, 104 bp, synthetic construct
  source 1..104: mol_type = other DNA
gtgacggacaggcgtgttttagagctacctgaaggtaaagatcgggtcctcttttttttcagccaactccaattttttttgaggacccgatctttaccttcagg

SEQ ID NO: 195 - DNA, 104 bp, synthetic construct
  source 1..104: mol_type = other DNA
gcggggccgcgtcctgttttagagctacctgaaggtaaagatcgggtcctcttttttttcagccaactccaattttttttgaggacccgatctttaccttcagg

SEQ ID NO: 196 - DNA, 104 bp, synthetic construct
  source 1..104: mol_type = other DNA
gcagaggcctttaaagttttagagctacctgaaggtaaagatcgggtcctcttttttttcagccaactccaattttttttgaggacccgatctttaccttcagg

SEQ ID NO: 197 - DNA, 102 bp, synthetic construct
  source 1..102: mol_type = other DNA
gccgcagcctagcttgttttagagctacctggttatagcggacgcactgtttttttttcagccaactccaattttttttacagtgcgtccgctataaccagg

SEQ ID NO: 198 - DNA, 102 bp, synthetic construct
  source 1..102: mol_type = other DNA
gtgacggacaggcgtgttttagagctacctggttatagcggacgcactgtttttttttcagccaactccaattttttttacagtgcgtccgctataaccagg

SEQ ID NO: 199 - DNA, 102 bp, synthetic construct
  source 1..102: mol_type = other DNA
gcggggccgcgtcctgttttagagctacctggttatagcggacgcactgtttttttttcagccaactccaattttttttacagtgcgtccgctataaccagg

SEQ ID NO: 200 - DNA, 102 bp, synthetic construct
  source 1..102: mol_type = other DNA
gcagaggcctttaaagttttagagctacctggttatagcggacgcactgtttttttttcagccaactccaattttttttacagtgcgtccgctataaccagg

SEQ ID NO: 201 - DNA, 102 bp, synthetic construct
  source 1..102: mol_type = other DNA
gccgcagcctagcttgttttagagctaccgcatcgtattatctgcgaagcttttttttcagccaactccaattttttttgcttcgcagataatacgatgcgg

SEQ ID NO: 202 - DNA, 102 bp, synthetic construct
  source 1..102: mol_type = other DNA
gtgacggacaggcgtgttttagagctaccgcatcgtattatctgcgaagcttttttttcagccaactccaattttttttgcttcgcagataatacgatgcgg

SEQ ID NO: 203 - DNA, 102 bp, synthetic construct
  source 1..102: mol_type = other DNA
gcggggccgcgtcctgttttagagctaccgcatcgtattatctgcgaagcttttttttcagccaactccaattttttttgcttcgcagataatacgatgcgg

SEQ ID NO: 204 - DNA, 102 bp, synthetic construct
  source 1..102: mol_type = other DNA
gcagaggcctttaaagttttagagctaccgcatcgtattatctgcgaagcttttttttcagccaactccaattttttttgcttcgcagataatacgatgcgg

SEQ ID NO: 205 - DNA, 102 bp, synthetic construct
  source 1..102: mol_type = other DNA
gccgcagcctagcttgttttagagctaccgctaggacgttcaacggagtcttttttttcagccaactccaattttttttgactccgttgaacgtcctagcgg

SEQ ID NO: 206 - DNA, 102 bp, synthetic construct
  source 1..102: mol_type = other DNA
gtgacggacaggcgtgttttagagctaccgctaggacgttcaacggagtcttttttttcagccaactccaattttttttgactccgttgaacgtcctagcgg

SEQ ID NO: 207 - DNA, 102 bp, synthetic construct
  source 1..102: mol_type = other DNA
gcggggccgcgtcctgttttagagctaccgctaggacgttcaacggagtcttttttttcagccaactccaattttttttgactccgttgaacgtcctagcgg

SEQ ID NO: 208 - DNA, 102 bp, synthetic construct
  source 1..102: mol_type = other DNA
gcagaggcctttaaagttttagagctaccgctaggacgttcaacggagtcttttttttcagccaactccaattttttttgactccgttgaacgtcctagcgg

SEQ ID NO: 209 - DNA, 102 bp, synthetic construct
  source 1..102: mol_type = other DNA
gccgcagcctagcttgttttagagctaccatagcggtactatcggcatctttttttttcagccaactccaattttttttagatgccgatagtaccgctatgg

SEQ ID NO: 210 - DNA, 102 bp, synthetic construct
  source 1..102: mol_type = other DNA
gtgacggacaggcgtgttttagagctaccatagcggtactatcggcatctttttttttcagccaactccaattttttttagatgccgatagtaccgctatgg

SEQ ID NO: 211 - DNA, 102 bp, synthetic construct
  source 1..102: mol_type = other DNA
gcggggccgcgtcctgttttagagctaccatagcggtactatcggcatctttttttttcagccaactccaattttttttagatgccgatagtaccgctatgg

SEQ ID NO: 212 - DNA, 102 bp, synthetic construct
  source 1..102: mol_type = other DNA
gcagaggcctttaaagttttagagctaccatagcggtactatcggcatctttttttttcagccaactccaattttttttagatgccgatagtaccgctatgg

SEQ ID NO: 213 - DNA, 102 bp, synthetic construct
  source 1..102: mol_type = other DNA
gccgcagcctagcttgttttagagctacctcgtactagtctcgcatgaccttttttttcagccaactccaattttttttggtcatgcgagactagtacgagg

SEQ ID NO: 214 - DNA, 102 bp, synthetic construct
  source 1..102: mol_type = other DNA
gtgacggacaggcgtgttttagagctacctcgtactagtctcgcatgaccttttttttcagccaactccaattttttttggtcatgcgagactagtacgagg

SEQ ID NO: 215 - DNA, 102 bp, synthetic construct
  source 1..102: mol_type = other DNA
gcggggccgcgtcctgttttagagctacctcgtactagtctcgcatgaccttttttttcagccaactccaattttttttggtcatgcgagactagtacgagg

SEQ ID NO: 216 - DNA, 102 bp, synthetic construct
  source 1..102: mol_type = other DNA
gcagaggcctttaaagttttagagctacctcgtactagtctcgcatgaccttttttttcagccaactccaattttttttggtcatgcgagactagtacgagg

SEQ ID NO: 217 - DNA, 102 bp, synthetic construct
  source 1..102: mol_type = other DNA
gccgcagcctagcttgttttagagctaccgatagtgctaaacgacgctttttttttttcagccaactccaattttttttaaagcgtcgtttagcactatcgg

SEQ ID NO: 218 - DNA, 102 bp, synthetic construct
  source 1..102: mol_type = other DNA
gtgacggacaggcgtgttttagagctaccgatagtgctaaacgacgctttttttttttcagccaactccaattttttttaaagcgtcgtttagcactatcgg

SEQ ID NO: 219 - DNA, 102 bp, synthetic construct
  source 1..102: mol_type = other DNA
gcggggccgcgtcctgttttagagctaccgatagtgctaaacgacgctttttttttttcagccaactccaattttttttaaagcgtcgtttagcactatcgg

SEQ ID NO: 220 - DNA, 102 bp, synthetic construct
  source 1..102: mol_type = other DNA
gcagaggcctttaaagttttagagctaccgatagtgctaaacgacgctttttttttttcagccaactccaattttttttaaagcgtcgtttagcactatcgg

SEQ ID NO: 221 - DNA, 102 bp, synthetic construct
  source 1..102: mol_type = other DNA
gccgcagcctagcttgttttagagctacccgttatcgacgttcaaggaacttttttttcagccaactccaattttttttgttccttgaacgtcgataacggg

SEQ ID NO: 222 - DNA, 102 bp, synthetic construct
  source 1..102: mol_type = other DNA
gtgacggacaggcgtgttttagagctacccgttatcgacgttcaaggaacttttttttcagccaactccaattttttttgttccttgaacgtcgataacggg

SEQ ID NO: 223 - DNA, 102 bp, synthetic construct
  source 1..102: mol_type = other DNA
gcggggccgcgtcctgttttagagctacccgttatcgacgttcaaggaacttttttttcagccaactccaattttttttgttccttgaacgtcgataacggg

SEQ ID NO: 224 - DNA, 102 bp, synthetic construct
  source 1..102: mol_type = other DNA
gcagaggcctttaaagttttagagctacccgttatcgacgttcaaggaacttttttttcagccaactccaattttttttgttccttgaacgtcgataacggg

SEQ ID NO: 225 - DNA, 102 bp, synthetic construct
  source 1..102: mol_type = other DNA
gccgcagcctagcttgttttagagctaccgatcaatgcggtctgcgtaacttttttttcagccaactccaattttttttgttacgcagaccgcattgatcgg

SEQ ID NO: 226 - DNA, 102 bp, synthetic construct
  source 1..102: mol_type = other DNA
gtgacggacaggcgtgttttagagctaccgatcaatgcggtctgcgtaacttttttttcagccaactccaattttttttgttacgcagaccgcattgatcgg

SEQ ID NO: 227 - DNA, 102 bp, synthetic construct
  source 1..102: mol_type = other DNA
gcggggccgcgtcctgttttagagctaccgatcaatgcggtctgcgtaacttttttttcagccaactccaattttttttgttacgcagaccgcattgatcgg

SEQ ID NO: 228 - DNA, 102 bp, synthetic construct
  source 1..102: mol_type = other DNA
gcagaggcctttaaagttttagagctaccgatcaatgcggtctgcgtaacttttttttcagccaactccaattttttttgttacgcagaccgcattgatcgg

SEQ ID NO: 229 - DNA, 102 bp, synthetic construct
  source 1..102: mol_type = other DNA
gccgcagcctagcttgttttagagctacccttactcgcgatactctcgacttttttttcagccaactccaattttttttgtcgagagtatcgcgagtaaggg

SEQ ID NO: 230 - DNA, 102 bp, synthetic construct
  source 1..102: mol_type = other DNA
gtgacggacaggcgtgttttagagctacccttactcgcgatactctcgacttttttttcagccaactccaattttttttgtcgagagtatcgcgagtaaggg

SEQ ID NO: 231 - DNA, 102 bp, synthetic construct
  source 1..102: mol_type = other DNA
gcggggccgcgtcctgttttagagctacccttactcgcgatactctcgacttttttttcagccaactccaattttttttgtcgagagtatcgcgagtaaggg

SEQ ID NO: 232 - DNA, 102 bp, synthetic construct
  source 1..102: mol_type = other DNA
gcagaggcctttaaagttttagagctacccttactcgcgatactctcgacttttttttcagccaactccaattttttttgtcgagagtatcgcgagtaaggg

SEQ ID NO: 233 - DNA, 102 bp, synthetic construct
  source 1..102: mol_type = other DNA
gccgcagcctagcttgttttagagctaccgcggacggtaagcacggaatattttttttcagccaactccaatttttttttattccgtgcttaccgtccgcgg

SEQ ID NO: 234 - DNA, 102 bp, synthetic construct
  source 1..102: mol_type = other DNA
gtgacggacaggcgtgttttagagctaccgcggacggtaagcacggaatattttttttcagccaactccaatttttttttattccgtgcttaccgtccgcgg

SEQ ID NO: 235 - DNA, 102 bp, synthetic construct
  source 1..102: mol_type = other DNA
gcggggccgcgtcctgttttagagctaccgcggacggtaagcacggaatattttttttcagccaactccaatttttttttattccgtgcttaccgtccgcgg

SEQ ID NO: 236 - DNA, 102 bp, synthetic construct
  source 1..102: mol_type = other DNA
gcagaggcctttaaagttttagagctaccgcggacggtaagcacggaatattttttttcagccaactccaatttttttttattccgtgcttaccgtccgcgg

SEQ ID NO: 237 - DNA, 102 bp, synthetic construct
  source 1..102: mol_type = other DNA
gccgcagcctagcttgttttagagctacctatagtcacgaatcgtagggtttttttttcagccaactccaattttttttaccctacgattcgtgactatagg

SEQ ID NO: 238 - DNA, 102 bp, synthetic construct
  source 1..102: mol_type = other DNA
gtgacggacaggcgtgttttagagctacctatagtcacgaatcgtagggtttttttttcagccaactccaattttttttaccctacgattcgtgactatagg

SEQ ID NO: 239 - DNA, 102 bp, synthetic construct
  source 1..102: mol_type = other DNA
gcggggccgcgtcctgttttagagctacctatagtcacgaatcgtagggtttttttttcagccaactccaattttttttaccctacgattcgtgactatagg

SEQ ID NO: 240 - DNA, 102 bp, synthetic construct
  source 1..102: mol_type = other DNA
gcagaggcctttaaagttttagagctacctatagtcacgaatcgtagggtttttttttcagccaactccaattttttttaccctacgattcgtgactatagg

SEQ ID NO: 241 - DNA, 102 bp, synthetic construct
  source 1..102: mol_type = other DNA
gccgcagcctagcttgttttagagctacccgtcgtcacgtatgcgtagcattttttttcagccaactccaatttttttttgctacgcatacgtgacgacggg

SEQ ID NO: 242 - DNA, 102 bp, synthetic construct
  source 1..102: mol_type = other DNA
gtgacggacaggcgtgttttagagctacccgtcgtcacgtatgcgtagcattttttttcagccaactccaatttttttttgctacgcatacgtgacgacggg

SEQ ID NO: 243 - DNA, 102 bp, synthetic construct
  source 1..102: mol_type = other DNA
gcggggccgcgtcctgttttagagctacccgtcgtcacgtatgcgtagcattttttttcagccaactccaatttttttttgctacgcatacgtgacgacggg

SEQ ID NO: 244 - DNA, 102 bp, synthetic construct
  source 1..102: mol_type = other DNA
gcagaggcctttaaagttttagagctacccgtcgtcacgtatgcgtagcattttttttcagccaactccaatttttttttgctacgcatacgtgacgacggg

SEQ ID NO: 245 - DNA, 102 bp, synthetic construct
  source 1..102: mol_type = other DNA
gccgcagcctagcttgttttagagctacccgagaggtagtagacgacgcattttttttcagccaactccaatttttttttgcgtcgtctactacctctcggg

SEQ ID NO: 246 - DNA, 102 bp, synthetic construct
  source 1..102: mol_type = other DNA
gtgacggacaggcgtgttttagagctacccgagaggtagtagacgacgcattttttttcagccaactccaatttttttttgcgtcgtctactacctctcggg

SEQ ID NO: 247 - DNA, 102 bp, synthetic construct
  source 1..102: mol_type = other DNA
gcggggccgcgtcctgttttagagctacccgagaggtagtagacgacgcattttttttcagccaactccaatttttttttgcgtcgtctactacctctcggg

SEQ ID NO: 248 - DNA, 102 bp, synthetic construct
  source 1..102: mol_type = other DNA
gcagaggcctttaaagttttagagctacccgagaggtagtagacgacgcattttttttcagccaactccaatttttttttgcgtcgtctactacctctcggg

SEQ ID NO: 249 - DNA, 102 bp, synthetic construct
  source 1..102: mol_type = other DNA
gccgcagcctagcttgttttagagctaccgacgtctacggacgggagctattttttttcagccaactccaatttttttttagctcccgtccgtagacgtcgg

SEQ ID NO: 250 - DNA, 102 bp, synthetic construct
  source 1..102: mol_type = other DNA
gtgacggacaggcgtgttttagagctaccgacgtctacggacgggagctattttttttcagccaactccaatttttttttagctcccgtccgtagacgtcgg

SEQ ID NO: 251 - DNA, 102 bp, synthetic construct
  source 1..102: mol_type = other DNA
gcggggccgcgtcctgttttagagctaccgacgtctacggacgggagctattttttttcagccaactccaatttttttttagctcccgtccgtagacgtcgg

SEQ ID NO: 252 - DNA, 102 bp, synthetic construct
  source 1..102: mol_type = other DNA
gcagaggcctttaaagttttagagctaccgacgtctacggacgggagctattttttttcagccaactccaatttttttttagctcccgtccgtagacgtcgg

SEQ ID NO: 253 - DNA, 102 bp, synthetic construct
  source 1..102: mol_type = other DNA
gccgcagcctagcttgttttagagctaccaaagctcattcgcgactgagcttttttttcagccaactccaattttttttgctcagtcgcgaatgagctttgg

SEQ ID NO: 254 - DNA, 102 bp, synthetic construct
  source 1..102: mol_type = other DNA
gtgacggacaggcgtgttttagagctaccaaagctcattcgcgactgagcttttttttcagccaactccaattttttttgctcagtcgcgaatgagctttgg

SEQ ID NO: 255 - DNA, 102 bp, synthetic construct
  source 1..102: mol_type = other DNA
gcggggccgcgtcctgttttagagctaccaaagctcattcgcgactgagcttttttttcagccaactccaattttttttgctcagtcgcgaatgagctttgg

SEQ ID NO: 256 - DNA, 102 bp, synthetic construct
  source 1..102: mol_type = other DNA
gcagaggcctttaaagttttagagctaccaaagctcattcgcgactgagcttttttttcagccaactccaattttttttgctcagtcgcgaatgagctttgg

SEQ ID NO: 257 - DNA, 102 bp, synthetic construct
  source 1..102: mol_type = other DNA
gccgcagcctagcttgttttagagctaccatggcacgatcgacacggaggttttttttcagccaactccaattttttttcctccgtgtcgatcgtgccatgg

SEQ ID NO: 258 - DNA, 102 bp, synthetic construct
  source 1..102: mol_type = other DNA
gtgacggacaggcgtgttttagagctaccatggcacgatcgacacggaggttttttttcagccaactccaattttttttcctccgtgtcgatcgtgccatgg

SEQ ID NO: 259 - DNA, 102 bp, synthetic construct
  source 1..102: mol_type = other DNA
gcggggccgcgtcctgttttagagctaccatggcacgatcgacacggaggttttttttcagccaactccaattttttttcctccgtgtcgatcgtgccatgg

SEQ ID NO: 260 - DNA, 102 bp, synthetic construct
  source 1..102: mol_type = other DNA
gcagaggcctttaaagttttagagctaccatggcacgatcgacacggaggttttttttcagccaactccaattttttttcctccgtgtcgatcgtgccatgg

SEQ ID NO: 261 - DNA, 102 bp, synthetic construct
  source 1..102: mol_type = other DNA
gccgcagcctagcttgttttagagctacccgaactctctatcgaacgagtttttttttcagccaactccaattttttttactcgttcgatagagagttcggg

SEQ ID NO: 262 - DNA, 102 bp, synthetic construct
  source 1..102: mol_type = other DNA
gtgacggacaggcgtgttttagagctacccgaactctctatcgaacgagtttttttttcagccaactccaattttttttactcgttcgatagagagttcggg

SEQ ID NO: 263 - DNA, 102 bp, synthetic construct
  source 1..102: mol_type = other DNA
gcggggccgcgtcctgttttagagctacccgaactctctatcgaacgagtttttttttcagccaactccaattttttttactcgttcgatagagagttcggg

SEQ ID NO: 264 - DNA, 102 bp, synthetic construct
  source 1..102: mol_type = other DNA
gcagaggcctttaaagttttagagctacccgaactctctatcgaacgagtttttttttcagccaactccaattttttttactcgttcgatagagagttcggg

SEQ ID NO: 265 - DNA, 102 bp, synthetic construct
  source 1..102: mol_type = other DNA
gccgcagcctagcttgttttagagctacctacacgatagtggtcgtgcgcttttttttcagccaactccaattttttttgcgcacgaccactatcgtgtagg

SEQ ID NO: 266 - DNA, 102 bp, synthetic construct
  source 1..102: mol_type = other DNA
gtgacggacaggcgtgttttagagctacctacacgatagtggtcgtgcgcttttttttcagccaactccaattttttttgcgcacgaccactatcgtgtagg

SEQ ID NO: 267 - DNA, 102 bp, synthetic construct
  source 1..102: mol_type = other DNA
gcggggccgcgtcctgttttagagctacctacacgatagtggtcgtgcgcttttttttcagccaactccaattttttttgcgcacgaccactatcgtgtagg

SEQ ID NO: 268 - DNA, 102 bp, synthetic construct
  source 1..102: mol_type = other DNA
gcagaggcctttaaagttttagagctacctacacgatagtggtcgtgcgcttttttttcagccaactccaattttttttgcgcacgaccactatcgtgtagg

SEQ ID NO: 269 - DNA, 102 bp, synthetic construct
  source 1..102: mol_type = other DNA
gccgcagcctagcttgttttagagctaccctggcggaacgttcgagtaatttttttttcagccaactccaattttttttattactcgaacgttccgccaggg

SEQ ID NO: 270 - DNA, 102 bp, synthetic construct
  source 1..102: mol_type = other DNA
gtgacggacaggcgtgttttagagctaccctggcggaacgttcgagtaatttttttttcagccaactccaattttttttattactcgaacgttccgccaggg

SEQ ID NO: 271 - DNA, 102 bp, synthetic construct
  source 1..102: mol_type = other DNA
gcggggccgcgtcctgttttagagctaccctggcggaacgttcgagtaatttttttttcagccaactccaattttttttattactcgaacgttccgccaggg

SEQ ID NO: 272 - DNA, 102 bp, synthetic construct
  source 1..102: mol_type = other DNA
gcagaggcctttaaagttttagagctaccctggcggaacgttcgagtaatttttttttcagccaactccaattttttttattactcgaacgttccgccaggg

SEQ ID NO: 273 - DNA, 102 bp, synthetic construct
  source 1..102: mol_type = other DNA
gccgcagcctagcttgttttagagctacctacactcgacatcggtagctattttttttcagccaactccaatttttttttagctaccgatgtcgagtgtagg

SEQ ID NO: 274 - DNA, 102 bp, synthetic construct
  source 1..102: mol_type = other DNA
gtgacggacaggcgtgttttagagctacctacactcgacatcggtagctattttttttcagccaactccaatttttttttagctaccgatgtcgagtgtagg

SEQ ID NO: 275 - DNA, 102 bp, synthetic construct
  source 1..102: mol_type = other DNA
gcggggccgcgtcctgttttagagctacctacactcgacatcggtagctattttttttcagccaactccaatttttttttagctaccgatgtcgagtgtagg

SEQ ID NO: 276 - DNA, 102 bp, synthetic construct
  source 1..102: mol_type = other DNA
gcagaggcctttaaagttttagagctacctacactcgacatcggtagctattttttttcagccaactccaatttttttttagctaccgatgtcgagtgtagg

SEQ ID NO: 277 - DNA, 103 bp, synthetic construct
  source 1..103: mol_type = other DNA
gcgtggggtaaggggttttagagctaccgtcgttgtaccgtctacttgacttttttttcagccaactccaattttttttgtcaagtagacggtacaacgacgg

SEQ ID NO: 278 - DNA, 104 bp, synthetic construct
  source 1..104: mol_type = other DNA
gcacggcaatttctcgttttagagctaccgtcgttgtaccgtctacttgacttttttttcagccaactccaattttttttgtcaagtagacggtacaacgacgg

SEQ ID NO: 279 - DNA, 103 bp, synthetic construct
  source 1..103: mol_type = other DNA
gtgacgctaatatggttttagagctaccgtcgttgtaccgtctacttgacttttttttcagccaactccaattttttttgtcaagtagacggtacaacgacgg

SEQ ID NO: 280 - DNA, 104 bp, synthetic construct
  source 1..104: mol_type = other DNA
gcctaggggtagggagttttagagctaccgtcgttgtaccgtctacttgacttttttttcagccaactccaattttttttgtcaagtagacggtacaacgacgg

SEQ ID NO: 281 - DNA, 104 bp, synthetic construct
  source 1..104: mol_type = other DNA
gaggggcgggtccgagttttagagctaccgtcgttgtaccgtctacttgacttttttttcagccaactccaattttttttgtcaagtagacggtacaacgacgg

SEQ ID NO: 282 - DNA, 104 bp, synthetic construct
  source 1..104: mol_type = other DNA
gctaagcagcaacgtgttttagagctaccgtcgttgtaccgtctacttgacttttttttcagccaactccaattttttttgtcaagtagacggtacaacgacgg

SEQ ID NO: 283 - DNA, 103 bp, synthetic construct
  source 1..103: mol_type = other DNA
gctagctccccaccgttttagagctaccgtcgttgtaccgtctacttgacttttttttcagccaactccaattttttttgtcaagtagacggtacaacgacgg

SEQ ID NO: 284 - DNA, 104 bp, synthetic construct
  source 1..104: mol_type = other DNA
gagctgcatggtgatgttttagagctaccgtcgttgtaccgtctacttgacttttttttcagccaactccaattttttttgtcaagtagacggtacaacgacgg

SEQ ID NO: 285 - DNA, 103 bp, synthetic construct
  source 1..103: mol_type = other DNA
gcgtggggtaaggggttttagagctaccttcccgacttccgtaggagcgcttttttttcagccaactccaattttttttgcgctcctacggaagtcgggaagg

SEQ ID NO: 286 - DNA, 104 bp, synthetic construct
  source 1..104: mol_type = other DNA
gcacggcaatttctcgttttagagctaccttcccgacttccgtaggagcgcttttttttcagccaactccaattttttttgcgctcctacggaagtcgggaagg

SEQ ID NO: 287 - DNA, 103 bp, synthetic construct
  source 1..103: mol_type = other DNA
gtgacgctaatatggttttagagctaccttcccgacttccgtaggagcgcttttttttcagccaactccaattttttttgcgctcctacggaagtcgggaagg

SEQ ID NO: 288 - DNA, 104 bp, synthetic construct
  source 1..104: mol_type = other DNA
gcctaggggtagggagttttagagctaccttcccgacttccgtaggagcgcttttttttcagccaactccaattttttttgcgctcctacggaagtcgggaagg

SEQ ID NO: 289 - DNA, 104 bp, synthetic construct
  source 1..104: mol_type = other DNA
gaggggcgggtccgagttttagagctaccttcccgacttccgtaggagcgcttttttttcagccaactccaattttttttgcgctcctacggaagtcgggaagg

SEQ ID NO: 290 - DNA, 104 bp, synthetic construct
  source 1..104: mol_type = other DNA
gctaagcagcaacgtgttttagagctaccttcccgacttccgtaggagcgcttttttttcagccaactccaattttttttgcgctcctacggaagtcgggaagg

SEQ ID NO: 291 - DNA, 103 bp, synthetic construct
  source 1..103: mol_type = other DNA
gctagctccccaccgttttagagctaccttcccgacttccgtaggagcgcttttttttcagccaactccaattttttttgcgctcctacggaagtcgggaagg

SEQ ID NO: 292 - DNA, 104 bp, synthetic construct
  source 1..104: mol_type = other DNA
gagctgcatggtgatgttttagagctaccttcccgacttccgtaggagcgcttttttttcagccaactccaattttttttgcgctcctacggaagtcgggaagg

SEQ ID NO: 293 - DNA, 103 bp, synthetic construct
  source 1..103: mol_type = other DNA
gcgtggggtaaggggttttagagctacctgaaggtaaagatcgggtcctcttttttttcagccaactccaattttttttgaggacccgatctttaccttcagg

SEQ ID NO: 294 - DNA, 104 bp, synthetic construct
  source 1..104: mol_type = other DNA
gcacggcaatttctcgttttagagctacctgaaggtaaagatcgggtcctcttttttttcagccaactccaattttttttgaggacccgatctttaccttcagg

SEQ ID NO: 295 - DNA, 103 bp, synthetic construct
  source 1..103: mol_type = other DNA
gtgacgctaatatggttttagagctacctgaaggtaaagatcgggtcctcttttttttcagccaactccaattttttttgaggacccgatctttaccttcagg

SEQ ID NO: 296 - DNA, 104 bp, synthetic construct
  source 1..104: mol_type = other DNA
gcctaggggtagggagttttagagctacctgaaggtaaagatcgggtcctcttttttttcagccaactccaattttttttgaggacccgatctttaccttcagg

SEQ ID NO: 297 - DNA, 104 bp, synthetic construct
  source 1..104: mol_type = other DNA
gaggggcgggtccgagttttagagctacctgaaggtaaagatcgggtcctcttttttttcagccaactccaattttttttgaggacccgatctttaccttcagg

SEQ ID NO: 298 - DNA, 104 bp, synthetic construct
  source 1..104: mol_type = other DNA
gctaagcagcaacgtgttttagagctacctgaaggtaaagatcgggtcctcttttttttcagccaactccaattttttttgaggacccgatctttaccttcagg

SEQ ID NO: 299 - DNA, 103 bp, synthetic construct
  source 1..103: mol_type = other DNA
gctagctccccaccgttttagagctacctgaaggtaaagatcgggtcctcttttttttcagccaactccaattttttttgaggacccgatctttaccttcagg

SEQ ID NO: 300 - DNA, 104 bp, synthetic construct
  source 1..104: mol_type = other DNA
gagctgcatggtgatgttttagagctacctgaaggtaaagatcgggtcctcttttttttcagccaactccaattttttttgaggacccgatctttaccttcagg

SEQ ID NO: 301 - DNA, 101 bp, synthetic construct
  source 1..101: mol_type = other DNA
gcgtggggtaaggggttttagagctacctggttatagcggacgcactgtttttttttcagccaactccaattttttttacagtgcgtccgctataaccagg

SEQ ID NO: 302 - DNA, 102 bp, synthetic construct
  source 1..102: mol_type = other DNA
gcacggcaatttctcgttttagagctacctggttatagcggacgcactgtttttttttcagccaactccaattttttttacagtgcgtccgctataaccagg

SEQ ID NO: 303 - DNA, 101 bp, synthetic construct
  source 1..101: mol_type = other DNA
gtgacgctaatatggttttagagctacctggttatagcggacgcactgtttttttttcagccaactccaattttttttacagtgcgtccgctataaccagg

SEQ ID NO: 304 - DNA, 102 bp, synthetic construct
  source 1..102: mol_type = other DNA
gcctaggggtagggagttttagagctacctggttatagcggacgcactgtttttttttcagccaactccaattttttttacagtgcgtccgctataaccagg

SEQ ID NO: 305 - DNA, 102 bp, synthetic construct
  source 1..102: mol_type = other DNA
gaggggcgggtccgagttttagagctacctggttatagcggacgcactgtttttttttcagccaactccaattttttttacagtgcgtccgctataaccagg

SEQ ID NO: 306 - DNA, 102 bp, synthetic construct
  source 1..102: mol_type = other DNA
gctaagcagcaacgtgttttagagctacctggttatagcggacgcactgtttttttttcagccaactccaattttttttacagtgcgtccgctataaccagg

SEQ ID NO: 307 - DNA, 101 bp, synthetic construct
  source 1..101: mol_type = other DNA
gctagctccccaccgttttagagctacctggttatagcggacgcactgtttttttttcagccaactccaattttttttacagtgcgtccgctataaccagg

SEQ ID NO: 308 - DNA, 102 bp, synthetic construct
  source 1..102: mol_type = other DNA
gagctgcatggtgatgttttagagctacctggttatagcggacgcactgtttttttttcagccaactccaattttttttacagtgcgtccgctataaccagg

SEQ ID NO: 309 - DNA, 101 bp, synthetic construct
  source 1..101: mol_type = other DNA
gcgtggggtaaggggttttagagctaccgcatcgtattatctgcgaagcttttttttcagccaactccaattttttttgcttcgcagataatacgatgcgg

SEQ ID NO: 310 - DNA, 102 bp, synthetic construct
  source 1..102: mol_type = other DNA
gcacggcaatttctcgttttagagctaccgcatcgtattatctgcgaagcttttttttcagccaactccaattttttttgcttcgcagataatacgatgcgg

SEQ ID NO: 311 - DNA, 101 bp, synthetic construct
  source 1..101: mol_type = other DNA
gtgacgctaatatggttttagagctaccgcatcgtattatctgcgaagcttttttttcagccaactccaattttttttgcttcgcagataatacgatgcgg

SEQ ID NO: 312 - DNA, 102 bp, synthetic construct
  source 1..102: mol_type = other DNA
gcctaggggtagggagttttagagctaccgcatcgtattatctgcgaagcttttttttcagccaactccaattttttttgcttcgcagataatacgatgcgg

SEQ ID NO: 313 - DNA, 102 bp, synthetic construct
  source 1..102: mol_type = other DNA
gaggggcgggtccgagttttagagctaccgcatcgtattatctgcgaagcttttttttcagccaactccaattttttttgcttcgcagataatacgatgcgg

SEQ ID NO: 314 - DNA, 102 bp, synthetic construct
  source 1..102: mol_type = other DNA
gctaagcagcaacgtgttttagagctaccgcatcgtattatctgcgaagcttttttttcagccaactccaattttttttgcttcgcagataatacgatgcgg

SEQ ID NO: 315 - DNA, 101 bp, synthetic construct
  source 1..101: mol_type = other DNA
gctagctccccaccgttttagagctaccgcatcgtattatctgcgaagcttttttttcagccaactccaattttttttgcttcgcagataatacgatgcgg

SEQ ID NO: 316 - DNA, 102 bp, synthetic construct
  source 1..102: mol_type = other DNA
gagctgcatggtgatgttttagagctaccgcatcgtattatctgcgaagcttttttttcagccaactccaattttttttgcttcgcagataatacgatgcgg

SEQ ID NO: 317 - DNA, 101 bp, synthetic construct
  source 1..101: mol_type = other DNA
gcgtggggtaaggggttttagagctaccgctaggacgttcaacggagtcttttttttcagccaactccaattttttttgactccgttgaacgtcctagcgg

SEQ ID NO: 318 - DNA, 102 bp, synthetic construct
  source 1..102: mol_type = other DNA
gcacggcaatttctcgttttagagctaccgctaggacgttcaacggagtcttttttttcagccaactccaattttttttgactccgttgaacgtcctagcgg

SEQ ID NO: 319 - DNA, 101 bp, synthetic construct
  source 1..101: mol_type = other DNA
gtgacgctaatatggttttagagctaccgctaggacgttcaacggagtcttttttttcagccaactccaattttttttgactccgttgaacgtcctagcgg

SEQ ID NO: 320 - DNA, 102 bp, synthetic construct
  source 1..102: mol_type = other DNA
gcctaggggtagggagttttagagctaccgctaggacgttcaacggagtcttttttttcagccaactccaattttttttgactccgttgaacgtcctagcgg

SEQ ID NO: 321 - DNA, 102 bp, synthetic construct
  source 1..102: mol_type = other DNA
gaggggcgggtccgagttttagagctaccgctaggacgttcaacggagtcttttttttcagccaactccaattttttttgactccgttgaacgtcctagcgg

SEQ ID NO: 322 - DNA, 102 bp, synthetic construct
  source 1..102: mol_type = other DNA
gctaagcagcaacgtgttttagagctaccgctaggacgttcaacggagtcttttttttcagccaactccaattttttttgactccgttgaacgtcctagcgg

SEQ ID NO: 323 - DNA, 101 bp, synthetic construct
  source 1..101: mol_type = other DNA
gctagctccccaccgttttagagctaccgctaggacgttcaacggagtcttttttttcagccaactccaattttttttgactccgttgaacgtcctagcgg

SEQ ID NO: 324 - DNA, 102 bp, synthetic construct
  source 1..102: mol_type = other DNA
gagctgcatggtgatgttttagagctaccgctaggacgttcaacggagtcttttttttcagccaactccaattttttttgactccgttgaacgtcctagcgg

SEQ ID NO: 325 - DNA, 101 bp, synthetic construct
  source 1..101: mol_type = other DNA
gcgtggggtaaggggttttagagctaccatagcggtactatcggcatctttttttttcagccaactccaattttttttagatgccgatagtaccgctatgg

SEQ ID NO: 326 - DNA, 102 bp, synthetic construct
  source 1..102: mol_type = other DNA
gcacggcaatttctcgttttagagctaccatagcggtactatcggcatctttttttttcagccaactccaattttttttagatgccgatagtaccgctatgg

SEQ ID NO: 327 - DNA, 101 bp, synthetic construct
  source 1..101: mol_type = other DNA
gtgacgctaatatggttttagagctaccatagcggtactatcggcatctttttttttcagccaactccaattttttttagatgccgatagtaccgctatgg

SEQ ID NO: 328 - DNA, 102 bp, synthetic construct
  source 1..102: mol_type = other DNA
gcctaggggtagggagttttagagctaccatagcggtactatcggcatctttttttttcagccaactccaattttttttagatgccgatagtaccgctatgg

SEQ ID NO: 329 - DNA, 102 bp, synthetic construct
  source 1..102: mol_type = other DNA
gaggggcgggtccgagttttagagctaccatagcggtactatcggcatctttttttttcagccaactccaattttttttagatgccgatagtaccgctatgg

SEQ ID NO: 330 - DNA, 102 bp, synthetic construct
  source 1..102: mol_type = other DNA
gctaagcagcaacgtgttttagagctaccatagcggtactatcggcatctttttttttcagccaactccaattttttttagatgccgatagtaccgctatgg

SEQ ID NO: 331 - DNA, 101 bp, synthetic construct
  source 1..101: mol_type = other DNA
gctagctccccaccgttttagagctaccatagcggtactatcggcatctttttttttcagccaactccaattttttttagatgccgatagtaccgctatgg

SEQ ID NO: 332 - DNA, 102 bp, synthetic construct
  source 1..102: mol_type = other DNA
gagctgcatggtgatgttttagagctaccatagcggtactatcggcatctttttttttcagccaactccaattttttttagatgccgatagtaccgctatgg

SEQ ID NO: 333 - DNA, 101 bp, synthetic construct
  source 1..101: mol_type = other DNA
gcgtggggtaaggggttttagagctacctcgtactagtctcgcatgaccttttttttcagccaactccaattttttttggtcatgcgagactagtacgagg

SEQ ID NO: 334 - DNA, 102 bp, synthetic construct
  source 1..102: mol_type = other DNA
gcacggcaatttctcgttttagagctacctcgtactagtctcgcatgaccttttttttcagccaactccaattttttttggtcatgcgagactagtacgagg

SEQ ID NO: 335 - DNA, 101 bp, synthetic construct
  source 1..101: mol_type = other DNA
gtgacgctaatatggttttagagctacctcgtactagtctcgcatgaccttttttttcagccaactccaattttttttggtcatgcgagactagtacgagg

SEQ ID NO: 336 - DNA, 102 bp, synthetic construct
  source 1..102: mol_type = other DNA
gcctaggggtagggagttttagagctacctcgtactagtctcgcatgaccttttttttcagccaactccaattttttttggtcatgcgagactagtacgagg

SEQ ID NO: 337 - DNA, 102 bp, synthetic construct
  source 1..102: mol_type = other DNA
gaggggcgggtccgagttttagagctacctcgtactagtctcgcatgaccttttttttcagccaactccaattttttttggtcatgcgagactagtacgagg

SEQ ID NO: 338 - DNA, 102 bp, synthetic construct
  source 1..102: mol_type = other DNA
gctaagcagcaacgtgttttagagctacctcgtactagtctcgcatgaccttttttttcagccaactccaattttttttggtcatgcgagactagtacgagg

SEQ ID NO: 339 - DNA, 101 bp, synthetic construct
  source 1..101: mol_type = other DNA
gctagctccccaccgttttagagctacctcgtactagtctcgcatgaccttttttttcagccaactccaattttttttggtcatgcgagactagtacgagg

SEQ ID NO: 340 - DNA, 102 bp, synthetic construct
  source 1..102: mol_type = other DNA
gagctgcatggtgatgttttagagctacctcgtactagtctcgcatgaccttttttttcagccaactccaattttttttggtcatgcgagactagtacgagg

SEQ ID NO: 341 - DNA, 101 bp, synthetic construct
  source 1..101: mol_type = other DNA
gcgtggggtaaggggttttagagctaccgatagtgctaaacgacgctttttttttttcagccaactccaattttttttaaagcgtcgtttagcactatcgg

SEQ ID NO: 342 - DNA, 102 bp, synthetic construct
  source 1..102: mol_type = other DNA
gcacggcaatttctcgttttagagctaccgatagtgctaaacgacgctttttttttttcagccaactccaattttttttaaagcgtcgtttagcactatcgg

SEQ ID NO: 343 - DNA, 101 bp, synthetic construct
  source 1..101: mol_type = other DNA
gtgacgctaatatggttttagagctaccgatagtgctaaacgacgctttttttttttcagccaactccaattttttttaaagcgtcgtttagcactatcgg

SEQ ID NO: 344 - DNA, 102 bp, synthetic construct
  source 1..102: mol_type = other DNA
gcctaggggtagggagttttagagctaccgatagtgctaaacgacgctttttttttttcagccaactccaattttttttaaagcgtcgtttagcactatcgg

SEQ ID NO: 345 - DNA, 102 bp, synthetic construct
  source 1..102: mol_type = other DNA
gaggggcgggtccgagttttagagctaccgatagtgctaaacgacgctttttttttttcagccaactccaattttttttaaagcgtcgtttagcactatcgg

SEQ ID NO: 346 - DNA, 102 bp, synthetic construct
  source 1..102: mol_type = other DNA
gctaagcagcaacgtgttttagagctaccgatagtgctaaacgacgctttttttttttcagccaactccaattttttttaaagcgtcgtttagcactatcgg

SEQ ID NO: 347 - DNA, 101 bp, synthetic construct
  source 1..101: mol_type = other DNA
gctagctccccaccgttttagagctaccgatagtgctaaacgacgctttttttttttcagccaactccaattttttttaaagcgtcgtttagcactatcgg

SEQ ID NO: 348 - DNA, 102 bp, synthetic construct
  source 1..102: mol_type = other DNA
gagctgcatggtgatgttttagagctaccgatagtgctaaacgacgctttttttttttcagccaactccaattttttttaaagcgtcgtttagcactatcgg

SEQ ID NO: 349 - DNA, 101 bp, synthetic construct
  source 1..101: mol_type = other DNA
gcgtggggtaaggggttttagagctacccgttatcgacgttcaaggaacttttttttcagccaactccaattttttttgttccttgaacgtcgataacggg

SEQ ID NO: 350 - DNA, 102 bp, synthetic construct
  source 1..102: mol_type = other DNA
gcacggcaatttctcgttttagagctacccgttatcgacgttcaaggaacttttttttcagccaactccaattttttttgttccttgaacgtcgataacggg

SEQ ID NO: 351 - DNA, 101 bp, synthetic construct
  source 1..101: mol_type = other DNA
gtgacgctaatatggttttagagctacccgttatcgacgttcaaggaacttttttttcagccaactccaattttttttgttccttgaacgtcgataacggg

SEQ ID NO: 352 - DNA, 102 bp, synthetic construct
  source 1..102: mol_type = other DNA
gcctaggggtagggagttttagagctacccgttatcgacgttcaaggaacttttttttcagccaactccaattttttttgttccttgaacgtcgataacggg

SEQ ID NO: 353 - DNA, 102 bp, synthetic construct
  source 1..102: mol_type = other DNA
gaggggcgggtccgagttttagagctacccgttatcgacgttcaaggaacttttttttcagccaactccaattttttttgttccttgaacgtcgataacggg

SEQ ID NO: 354 - DNA, 102 bp, synthetic construct
  source 1..102: mol_type = other DNA
gctaagcagcaacgtgttttagagctacccgttatcgacgttcaaggaacttttttttcagccaactccaattttttttgttccttgaacgtcgataacggg

SEQ ID NO: 355 - DNA, 101 bp, synthetic construct
  source 1..101: mol_type = other DNA
gctagctccccaccgttttagagctacccgttatcgacgttcaaggaacttttttttcagccaactccaattttttttgttccttgaacgtcgataacggg

SEQ ID NO: 356 - DNA, 102 bp, synthetic construct
  source 1..102: mol_type = other DNA
gagctgcatggtgatgttttagagctacccgttatcgacgttcaaggaacttttttttcagccaactccaattttttttgttccttgaacgtcgataacggg

SEQ ID NO: 357 - DNA, 101 bp, synthetic construct
  source 1..101: mol_type = other DNA
gcgtggggtaaggggttttagagctaccgatcaatgcggtctgcgtaacttttttttcagccaactccaattttttttgttacgcagaccgcattgatcgg

SEQ ID NO: 358 - DNA, 102 bp, synthetic construct
  source 1..102: mol_type = other DNA
gcacggcaatttctcgttttagagctaccgatcaatgcggtctgcgtaacttttttttcagccaactccaattttttttgttacgcagaccgcattgatcgg

SEQ ID NO: 359 - DNA, 101 bp, synthetic construct
  source 1..101: mol_type = other DNA
gtgacgctaatatggttttagagctaccgatcaatgcggtctgcgtaacttttttttcagccaactccaattttttttgttacgcagaccgcattgatcgg

SEQ ID NO: 360 - DNA, 102 bp, synthetic construct
  source 1..102: mol_type = other DNA
gcctaggggtagggagttttagagctaccgatcaatgcggtctgcgtaacttttttttcagccaactccaattttttttgttacgcagaccgcattgatcgg

SEQ ID NO: 361 - DNA, 102 bp, synthetic construct
  source 1..102: mol_type = other DNA
gaggggcgggtccgagttttagagctaccgatcaatgcggtctgcgtaacttttttttcagccaactccaattttttttgttacgcagaccgcattgatcgg

SEQ ID NO: 362 - DNA, 102 bp, synthetic construct
  source 1..102: mol_type = other DNA
gctaagcagcaacgtgttttagagctaccgatcaatgcggtctgcgtaacttttttttcagccaactccaattttttttgttacgcagaccgcattgatcgg

SEQ ID NO: 363 - DNA, 101 bp, synthetic construct
  source 1..101: mol_type = other DNA
gctagctccccaccgttttagagctaccgatcaatgcggtctgcgtaacttttttttcagccaactccaattttttttgttacgcagaccgcattgatcgg

SEQ ID NO: 364 - DNA, 102 bp, synthetic construct
  source 1..102: mol_type = other DNA
gagctgcatggtgatgttttagagctaccgatcaatgcggtctgcgtaacttttttttcagccaactccaattttttttgttacgcagaccgcattgatcgg

SEQ ID NO: 365 - DNA, 101 bp, synthetic construct
  source 1..101: mol_type = other DNA
gcgtggggtaaggggttttagagctacccttactcgcgatactctcgacttttttttcagccaactccaattttttttgtcgagagtatcgcgagtaaggg

SEQ ID NO: 366 - DNA, 102 bp, synthetic construct
  source 1..102: mol_type = other DNA
gcacggcaatttctcgttttagagctacccttactcgcgatactctcgacttttttttcagccaactccaattttttttgtcgagagtatcgcgagtaaggg

SEQ ID NO: 367 - DNA, 101 bp, synthetic construct
  source 1..101: mol_type = other DNA
gtgacgctaatatggttttagagctacccttactcgcgatactctcgacttttttttcagccaactccaattttttttgtcgagagtatcgcgagtaaggg

SEQ ID NO: 368 - DNA, 102 bp, synthetic construct
  source 1..102: mol_type = other DNA
gcctaggggtagggagttttagagctacccttactcgcgatactctcgacttttttttcagccaactccaattttttttgtcgagagtatcgcgagtaaggg

SEQ ID NO: 369 - DNA, 102 bp, synthetic construct
  source 1..102: mol_type = other DNA
gaggggcgggtccgagttttagagctacccttactcgcgatactctcgacttttttttcagccaactccaattttttttgtcgagagtatcgcgagtaaggg

SEQ ID NO: 370 - DNA, 102 bp, synthetic construct
  source 1..102: mol_type = other DNA
gctaagcagcaacgtgttttagagctacccttactcgcgatactctcgacttttttttcagccaactccaattttttttgtcgagagtatcgcgagtaaggg

SEQ ID NO: 371 - DNA, 101 bp, synthetic construct
  source 1..101: mol_type = other DNA
gctagctccccaccgttttagagctacccttactcgcgatactctcgacttttttttcagccaactccaattttttttgtcgagagtatcgcgagtaaggg

SEQ ID NO: 372 - DNA, 102 bp, synthetic construct
  source 1..102: mol_type = other DNA
gagctgcatggtgatgttttagagctacccttactcgcgatactctcgacttttttttcagccaactccaattttttttgtcgagagtatcgcgagtaaggg

SEQ ID NO: 373 - DNA, 101 bp, synthetic construct
  source 1..101: mol_type = other DNA
gcgtggggtaaggggttttagagctaccgcggacggtaagcacggaatattttttttcagccaactccaatttttttttattccgtgcttaccgtccgcgg

SEQ ID NO: 374 - DNA, 102 bp, synthetic construct
  source 1..102: mol_type = other DNA
gcacggcaatttctcgttttagagctaccgcggacggtaagcacggaatattttttttcagccaactccaatttttttttattccgtgcttaccgtccgcgg

SEQ ID NO: 375 - DNA, 101 bp, synthetic construct
  source 1..101: mol_type = other DNA
gtgacgctaatatggttttagagctaccgcggacggtaagcacggaatattttttttcagccaactccaatttttttttattccgtgcttaccgtccgcgg

SEQ ID NO: 376 - DNA, 102 bp, synthetic construct
  source 1..102: mol_type = other DNA
gcctaggggtagggagttttagagctaccgcggacggtaagcacggaatattttttttcagccaactccaatttttttttattccgtgcttaccgtccgcgg

SEQ ID NO: 377 - DNA, 102 bp, synthetic construct
  source 1..102: mol_type = other DNA
gaggggcgggtccgagttttagagctaccgcggacggtaagcacggaatattttttttcagccaactccaatttttttttattccgtgcttaccgtccgcgg

SEQ ID NO: 378 - DNA, 102 bp, synthetic construct
  source 1..102: mol_type = other DNA
gctaagcagcaacgtgttttagagctaccgcggacggtaagcacggaatattttttttcagccaactccaatttttttttattccgtgcttaccgtccgcgg

SEQ ID NO: 379 - DNA, 101 bp, synthetic construct
  source 1..101: mol_type = other DNA
gctagctccccaccgttttagagctaccgcggacggtaagcacggaatattttttttcagccaactccaatttttttttattccgtgcttaccgtccgcgg

SEQ ID NO: 380 - DNA, 102 bp, synthetic construct
  source 1..102: mol_type = other DNA
gagctgcatggtgatgttttagagctaccgcggacggtaagcacggaatattttttttcagccaactccaatttttttttattccgtgcttaccgtccgcgg

SEQ ID NO: 381 - DNA, 101 bp, synthetic construct
  source 1..101: mol_type = other DNA
gcgtggggtaaggggttttagagctacctatagtcacgaatcgtagggtttttttttcagccaactccaattttttttaccctacgattcgtgactatagg

SEQ ID NO: 382 - DNA, 102 bp, synthetic construct
  source 1..102: mol_type = other DNA
gcacggcaatttctcgttttagagctacctatagtcacgaatcgtagggtttttttttcagccaactccaattttttttaccctacgattcgtgactatagg

SEQ ID NO: 383 - DNA, 101 bp, synthetic construct
  source 1..101: mol_type = other DNA
gtgacgctaatatggttttagagctacctatagtcacgaatcgtagggtttttttttcagccaactccaattttttttaccctacgattcgtgactatagg

SEQ ID NO: 384 - DNA, 102 bp, synthetic construct
  source 1..102: mol_type = other DNA
gcctaggggtagggagttttagagctacctatagtcacgaatcgtagggtttttttttcagccaactccaattttttttaccctacgattcgtgactatagg

SEQ ID NO: 385 - DNA, 102 bp, synthetic construct
  source 1..102: mol_type = other DNA
gaggggcgggtccgagttttagagctacctatagtcacgaatcgtagggtttttttttcagccaactccaattttttttaccctacgattcgtgactatagg

SEQ ID NO: 386 - DNA, 102 bp, synthetic construct
  source 1..102: mol_type = other DNA
gctaagcagcaacgtgttttagagctacctatagtcacgaatcgtagggtttttttttcagccaactccaattttttttaccctacgattcgtgactatagg

SEQ ID NO: 387 - DNA, 101 bp, synthetic construct
  source 1..101: mol_type = other DNA
gctagctccccaccgttttagagctacctatagtcacgaatcgtagggtttttttttcagccaactccaattttttttaccctacgattcgtgactatagg

SEQ ID NO: 388 - DNA, 102 bp, synthetic construct
  source 1..102: mol_type = other DNA
gagctgcatggtgatgttttagagctacctatagtcacgaatcgtagggtttttttttcagccaactccaattttttttaccctacgattcgtgactatagg

SEQ ID NO: 389 - DNA, 101 bp, synthetic construct
  source 1..101: mol_type = other DNA
gcgtggggtaaggggttttagagctacccgtcgtcacgtatgcgtagcattttttttcagccaactccaatttttttttgctacgcatacgtgacgacggg

SEQ ID NO: 390 - DNA, 102 bp, synthetic construct
  source 1..102: mol_type = other DNA
gcacggcaatttctcgttttagagctacccgtcgtcacgtatgcgtagcattttttttcagccaactccaatttttttttgctacgcatacgtgacgacggg

SEQ ID NO: 391 - DNA, 101 bp, synthetic construct
  source 1..101: mol_type = other DNA
gtgacgctaatatggttttagagctacccgtcgtcacgtatgcgtagcattttttttcagccaactccaatttttttttgctacgcatacgtgacgacggg

SEQ ID NO: 392 - DNA, 102 bp, synthetic construct
  source 1..102: mol_type = other DNA
gcctaggggtagggagttttagagctacccgtcgtcacgtatgcgtagcattttttttcagccaactccaatttttttttgctacgcatacgtgacgacggg

SEQ ID NO: 393 - DNA, 102 bp, synthetic construct
  source 1..102: mol_type = other DNA
gaggggcgggtccgagttttagagctacccgtcgtcacgtatgcgtagcattttttttcagccaactccaatttttttttgctacgcatacgtgacgacggg

SEQ ID NO: 394 - DNA, 102 bp, synthetic construct
  source 1..102: mol_type = other DNA
gctaagcagcaacgtgttttagagctacccgtcgtcacgtatgcgtagcattttttttcagccaactccaatttttttttgctacgcatacgtgacgacggg

SEQ ID NO: 395 - DNA, 101 bp, synthetic construct
  source 1..101: mol_type = other DNA
gctagctccccaccgttttagagctacccgtcgtcacgtatgcgtagcattttttttcagccaactccaatttttttttgctacgcatacgtgacgacggg

SEQ ID NO: 396 - DNA, 102 bp, synthetic construct
  source 1..102: mol_type = other DNA
gagctgcatggtgatgttttagagctacccgtcgtcacgtatgcgtagcattttttttcagccaactccaatttttttttgctacgcatacgtgacgacggg

SEQ ID NO: 397 - DNA, 101 bp, synthetic construct
  source 1..101: mol_type = other DNA
gcgtggggtaaggggttttagagctacccgagaggtagtagacgacgcattttttttcagccaactccaatttttttttgcgtcgtctactacctctcggg

SEQ ID NO: 398 - DNA, 102 bp, synthetic construct
  source 1..102: mol_type = other DNA
gcacggcaatttctcgttttagagctacccgagaggtagtagacgacgcattttttttcagccaactccaatttttttttgcgtcgtctactacctctcggg

SEQ ID NO: 399 - DNA, 101 bp, synthetic construct
  source 1..101: mol_type = other DNA
gtgacgctaatatggttttagagctacccgagaggtagtagacgacgcattttttttcagccaactccaatttttttttgcgtcgtctactacctctcggg

SEQ ID NO: 400 - DNA, 102 bp, synthetic construct
  source 1..102: mol_type = other DNA
gcctaggggtagggagttttagagctacccgagaggtagtagacgacgcattttttttcagccaactccaatttttttttgcgtcgtctactacctctcggg

SEQ ID NO: 401 - DNA, 102 bp, synthetic construct
  source 1..102: mol_type = other DNA
gaggggcgggtccgagttttagagctacccgagaggtagtagacgacgcattttttttcagccaactccaatttttttttgcgtcgtctactacctctcggg

SEQ ID NO: 402 - DNA, 102 bp, synthetic construct
  source 1..102: mol_type = other DNA
gctaagcagcaacgtgttttagagctacccgagaggtagtagacgacgcattttttttcagccaactccaatttttttttgcgtcgtctactacctctcggg

SEQ ID NO: 403 - DNA, 101 bp, synthetic construct
  source 1..101: mol_type = other DNA
gctagctccccaccgttttagagctacccgagaggtagtagacgacgcattttttttcagccaactccaatttttttttgcgtcgtctactacctctcggg

SEQ ID NO: 404 - DNA, 102 bp, synthetic construct
  source 1..102: mol_type = other DNA
gagctgcatggtgatgttttagagctacccgagaggtagtagacgacgcattttttttcagccaactccaatttttttttgcgtcgtctactacctctcggg

SEQ ID NO: 405 - DNA, 101 bp, synthetic construct
  source 1..101: mol_type = other DNA
gcgtggggtaaggggttttagagctaccgacgtctacggacgggagctattttttttcagccaactccaatttttttttagctcccgtccgtagacgtcgg

SEQ ID NO: 406 - DNA, 102 bp, synthetic construct
  source 1..102: mol_type = other DNA
gcacggcaatttctcgttttagagctaccgacgtctacggacgggagctattttttttcagccaactccaatttttttttagctcccgtccgtagacgtcgg

SEQ ID NO: 407 - DNA, 101 bp, synthetic construct
  source 1..101: mol_type = other DNA
gtgacgctaatatggttttagagctaccgacgtctacggacgggagctattttttttcagccaactccaatttttttttagctcccgtccgtagacgtcgg

SEQ ID NO: 408 - DNA, 102 bp, synthetic construct
  source 1..102: mol_type = other DNA
gcctaggggtagggagttttagagctaccgacgtctacggacgggagctattttttttcagccaactccaatttttttttagctcccgtccgtagacgtcgg

SEQ ID NO: 409 - DNA, 102 bp, synthetic construct
  source 1..102: mol_type = other DNA
gaggggcgggtccgagttttagagctaccgacgtctacggacgggagctattttttttcagccaactccaatttttttttagctcccgtccgtagacgtcgg

SEQ ID NO: 410 - DNA, 102 bp, synthetic construct
  source 1..102: mol_type = other DNA
gctaagcagcaacgtgttttagagctaccgacgtctacggacgggagctattttttttcagccaactccaatttttttttagctcccgtccgtagacgtcgg

SEQ ID NO: 411 - DNA, 101 bp, synthetic construct
  source 1..101: mol_type = other DNA
gctagctccccaccgttttagagctaccgacgtctacggacgggagctattttttttcagccaactccaatttttttttagctcccgtccgtagacgtcgg

SEQ ID NO: 412 - DNA, 102 bp, synthetic construct
  source 1..102: mol_type = other DNA
gagctgcatggtgatgttttagagctaccgacgtctacggacgggagctattttttttcagccaactccaatttttttttagctcccgtccgtagacgtcgg

SEQ ID NO: 413 - DNA, 101 bp, synthetic construct
  source 1..101: mol_type = other DNA
gcgtggggtaaggggttttagagctaccaaagctcattcgcgactgagcttttttttcagccaactccaattttttttgctcagtcgcgaatgagctttgg

SEQ ID NO: 414 - DNA, 102 bp, synthetic construct
  source 1..102: mol_type = other DNA
gcacggcaatttctcgttttagagctaccaaagctcattcgcgactgagcttttttttcagccaactccaattttttttgctcagtcgcgaatgagctttgg

SEQ ID NO: 415 - DNA, 101 bp, synthetic construct
  source 1..101: mol_type = other DNA
gtgacgctaatatggttttagagctaccaaagctcattcgcgactgagcttttttttcagccaactccaattttttttgctcagtcgcgaatgagctttgg

SEQ ID NO: 416 - DNA, 102 bp, synthetic construct
  source 1..102: mol_type = other DNA
gcctaggggtagggagttttagagctaccaaagctcattcgcgactgagcttttttttcagccaactccaattttttttgctcagtcgcgaatgagctttgg

SEQ ID NO: 417 - DNA, 102 bp, synthetic construct
  source 1..102: mol_type = other DNA
gaggggcgggtccgagttttagagctaccaaagctcattcgcgactgagcttttttttcagccaactccaattttttttgctcagtcgcgaatgagctttgg

SEQ ID NO: 418 - DNA, 102 bp, synthetic construct
  source 1..102: mol_type = other DNA
gctaagcagcaacgtgttttagagctaccaaagctcattcgcgactgagcttttttttcagccaactccaattttttttgctcagtcgcgaatgagctttgg

SEQ ID NO: 419 - DNA, 101 bp, synthetic construct
  source 1..101: mol_type = other DNA
gctagctccccaccgttttagagctaccaaagctcattcgcgactgagcttttttttcagccaactccaattttttttgctcagtcgcgaatgagctttgg

SEQ ID NO: 420 - DNA, 102 bp, synthetic construct
  source 1..102: mol_type = other DNA
gagctgcatggtgatgttttagagctaccaaagctcattcgcgactgagcttttttttcagccaactccaattttttttgctcagtcgcgaatgagctttgg

SEQ ID NO: 421 - DNA, 101 bp, synthetic construct
  source 1..101: mol_type = other DNA
gcgtggggtaaggggttttagagctaccatggcacgatcgacacggaggttttttttcagccaactccaattttttttcctccgtgtcgatcgtgccatgg

SEQ ID NO: 422 - DNA, 102 bp, synthetic construct
  source 1..102: mol_type = other DNA
gcacggcaatttctcgttttagagctaccatggcacgatcgacacggaggttttttttcagccaactccaattttttttcctccgtgtcgatcgtgccatgg

SEQ ID NO: 423 - DNA, 101 bp, synthetic construct
  source 1..101: mol_type = other DNA
gtgacgctaatatggttttagagctaccatggcacgatcgacacggaggttttttttcagccaactccaattttttttcctccgtgtcgatcgtgccatgg

SEQ ID NO: 424 - DNA, 102 bp, synthetic construct
  source 1..102: mol_type = other DNA
gcctaggggtagggagttttagagctaccatggcacgatcgacacggaggttttttttcagccaactccaattttttttcctccgtgtcgatcgtgccatgg

SEQ ID NO: 425 - DNA, 102 bp, synthetic construct
  source 1..102: mol_type = other DNA
gaggggcgggtccgagttttagagctaccatggcacgatcgacacggaggttttttttcagccaactccaattttttttcctccgtgtcgatcgtgccatgg

SEQ ID NO: 426 - DNA, 102 bp, synthetic construct
  source 1..102: mol_type = other DNA
gctaagcagcaacgtgttttagagctaccatggcacgatcgacacggaggttttttttcagccaactccaattttttttcctccgtgtcgatcgtgccatgg

SEQ ID NO: 427 - DNA, 101 bp, synthetic construct
  source 1..101: mol_type = other DNA
gctagctccccaccgttttagagctaccatggcacgatcgacacggaggttttttttcagccaactccaattttttttcctccgtgtcgatcgtgccatgg

SEQ ID NO: 428 - DNA, 102 bp, synthetic construct
  source 1..102: mol_type = other DNA
gagctgcatggtgatgttttagagctaccatggcacgatcgacacggaggttttttttcagccaactccaattttttttcctccgtgtcgatcgtgccatgg

SEQ ID NO: 429 - DNA, 101 bp, synthetic construct
  source 1..101: mol_type = other DNA
gcgtggggtaaggggttttagagctacccgaactctctatcgaacgagtttttttttcagccaactccaattttttttactcgttcgatagagagttcggg

SEQ ID NO: 430 - DNA, 102 bp, synthetic construct
  source 1..102: mol_type = other DNA
gcacggcaatttctcgttttagagctacccgaactctctatcgaacgagtttttttttcagccaactccaattttttttactcgttcgatagagagttcggg

SEQ ID NO: 431 - DNA, 101 bp, synthetic construct
  source 1..101: mol_type = other DNA
gtgacgctaatatggttttagagctacccgaactctctatcgaacgagtttttttttcagccaactccaattttttttactcgttcgatagagagttcggg

SEQ ID NO: 432 - DNA, 102 bp, synthetic construct
  source 1..102: mol_type = other DNA
gcctaggggtagggagttttagagctacccgaactctctatcgaacgagtttttttttcagccaactccaattttttttactcgttcgatagagagttcggg

SEQ ID NO: 433 - DNA, 102 bp, synthetic construct
  source 1..102: mol_type = other DNA
gaggggcgggtccgagttttagagctacccgaactctctatcgaacgagtttttttttcagccaactccaattttttttactcgttcgatagagagttcggg

SEQ ID NO: 434 - DNA, 102 bp, synthetic construct
  source 1..102: mol_type = other DNA
gctaagcagcaacgtgttttagagctacccgaactctctatcgaacgagtttttttttcagccaactccaattttttttactcgttcgatagagagttcggg

SEQ ID NO: 435 - DNA, 101 bp, synthetic construct
  source 1..101: mol_type = other DNA
gctagctccccaccgttttagagctacccgaactctctatcgaacgagtttttttttcagccaactccaattttttttactcgttcgatagagagttcggg

SEQ ID NO: 436 - DNA, 102 bp, synthetic construct
  source 1..102: mol_type = other DNA
gagctgcatggtgatgttttagagctacccgaactctctatcgaacgagtttttttttcagccaactccaattttttttactcgttcgatagagagttcggg

SEQ ID NO: 437 - DNA, 101 bp, synthetic construct
  source 1..101: mol_type = other DNA
gcgtggggtaaggggttttagagctacctacacgatagtggtcgtgcgcttttttttcagccaactccaattttttttgcgcacgaccactatcgtgtagg

SEQ ID NO: 438 - DNA, 102 bp, synthetic construct
  source 1..102: mol_type = other DNA
gcacggcaatttctcgttttagagctacctacacgatagtggtcgtgcgcttttttttcagccaactccaattttttttgcgcacgaccactatcgtgtagg

SEQ ID NO: 439 - DNA, 101 bp, synthetic construct
  source 1..101: mol_type = other DNA
gtgacgctaatatggttttagagctacctacacgatagtggtcgtgcgcttttttttcagccaactccaattttttttgcgcacgaccactatcgtgtagg

SEQ ID NO: 440 - DNA, 102 bp, synthetic construct
  source 1..102: mol_type = other DNA
gcctaggggtagggagttttagagctacctacacgatagtggtcgtgcgcttttttttcagccaactccaattttttttgcgcacgaccactatcgtgtagg

SEQ ID NO: 441 - DNA, 102 bp, synthetic construct
  source 1..102: mol_type = other DNA
gaggggcgggtccgagttttagagctacctacacgatagtggtcgtgcgcttttttttcagccaactccaattttttttgcgcacgaccactatcgtgtagg

SEQ ID NO: 442 - DNA, 102 bp, synthetic construct
  source 1..102: mol_type = other DNA
gctaagcagcaacgtgttttagagctacctacacgatagtggtcgtgcgcttttttttcagccaactccaattttttttgcgcacgaccactatcgtgtagg

SEQ ID NO: 443 - DNA, 101 bp, synthetic construct
  source 1..101: mol_type = other DNA
gctagctccccaccgttttagagctacctacacgatagtggtcgtgcgcttttttttcagccaactccaattttttttgcgcacgaccactatcgtgtagg

SEQ ID NO: 444 - DNA, 102 bp, synthetic construct
  source 1..102: mol_type = other DNA
gagctgcatggtgatgttttagagctacctacacgatagtggtcgtgcgcttttttttcagccaactccaattttttttgcgcacgaccactatcgtgtagg

SEQ ID NO: 445 - DNA, 101 bp, synthetic construct
  source 1..101: mol_type = other DNA
gcgtggggtaaggggttttagagctaccctggcggaacgttcgagtaatttttttttcagccaactccaattttttttattactcgaacgttccgccaggg

SEQ ID NO: 446 - DNA, 102 bp, synthetic construct
  source 1..102: mol_type = other DNA
gcacggcaatttctcgttttagagctaccctggcggaacgttcgagtaatttttttttcagccaactccaattttttttattactcgaacgttccgccaggg

SEQ ID NO: 447 - DNA, 101 bp, synthetic construct
  source 1..101: mol_type = other DNA
gtgacgctaatatggttttagagctaccctggcggaacgttcgagtaatttttttttcagccaactccaattttttttattactcgaacgttccgccaggg

SEQ ID NO: 448 - DNA, 102 bp, synthetic construct
  source 1..102: mol_type = other DNA
gcctaggggtagggagttttagagctaccctggcggaacgttcgagtaatttttttttcagccaactccaattttttttattactcgaacgttccgccaggg

SEQ ID NO: 449 - DNA, 102 bp, synthetic construct
  source 1..102: mol_type = other DNA
gaggggcgggtccgagttttagagctaccctggcggaacgttcgagtaatttttttttcagccaactccaattttttttattactcgaacgttccgccaggg

SEQ ID NO: 450 - DNA, 102 bp, synthetic construct
  source 1..102: mol_type = other DNA
gctaagcagcaacgtgttttagagctaccctggcggaacgttcgagtaatttttttttcagccaactccaattttttttattactcgaacgttccgccaggg

SEQ ID NO: 451 - DNA, 101 bp, synthetic construct
  source 1..101: mol_type = other DNA
gctagctccccaccgttttagagctaccctggcggaacgttcgagtaatttttttttcagccaactccaattttttttattactcgaacgttccgccaggg

SEQ ID NO: 452 - DNA, 102 bp, synthetic construct
  source 1..102: mol_type = other DNA
gagctgcatggtgatgttttagagctaccctggcggaacgttcgagtaatttttttttcagccaactccaattttttttattactcgaacgttccgccaggg

SEQ ID NO: 453 - DNA, 101 bp, synthetic construct
  source 1..101: mol_type = other DNA
gcgtggggtaaggggttttagagctacctacactcgacatcggtagctattttttttcagccaactccaatttttttttagctaccgatgtcgagtgtagg

SEQ ID NO: 454 - DNA, 102 bp, synthetic construct
  source 1..102: mol_type = other DNA
gcacggcaatttctcgttttagagctacctacactcgacatcggtagctattttttttcagccaactccaatttttttttagctaccgatgtcgagtgtagg

SEQ ID NO: 455 - DNA, 101 bp, synthetic construct
  source 1..101: mol_type = other DNA
gtgacgctaatatggttttagagctacctacactcgacatcggtagctattttttttcagccaactccaatttttttttagctaccgatgtcgagtgtagg

SEQ ID NO: 456 - DNA, 102 bp, synthetic construct
  source 1..102: mol_type = other DNA
gcctaggggtagggagttttagagctacctacactcgacatcggtagctattttttttcagccaactccaatttttttttagctaccgatgtcgagtgtagg

SEQ ID NO: 457 - DNA, 102 bp, synthetic construct
  source 1..102: mol_type = other DNA
gaggggcgggtccgagttttagagctacctacactcgacatcggtagctattttttttcagccaactccaatttttttttagctaccgatgtcgagtgtagg

SEQ ID NO: 458 - DNA, 102 bp, synthetic construct
  source 1..102: mol_type = other DNA
gctaagcagcaacgtgttttagagctacctacactcgacatcggtagctattttttttcagccaactccaatttttttttagctaccgatgtcgagtgtagg

SEQ ID NO: 459 - DNA, 101 bp, synthetic construct
  source 1..101: mol_type = other DNA
gctagctccccaccgttttagagctacctacactcgacatcggtagctattttttttcagccaactccaatttttttttagctaccgatgtcgagtgtagg

SEQ ID NO: 460 - DNA, 102 bp, synthetic construct
  source 1..102: mol_type = other DNA
gagctgcatggtgatgttttagagctacctacactcgacatcggtagctattttttttcagccaactccaatttttttttagctaccgatgtcgagtgtagg

SEQ ID NO: 461 - DNA, 104 bp, synthetic construct
  source 1..104: mol_type = other DNA
gccttacaggagtttgttttagagctaccgtcgttgtaccgtctacttgacttttttttcagccaactccaattttttttgtcaagtagacggtacaacgacgg

SEQ ID NO: 462 - DNA, 104 bp, synthetic construct
  source 1..104: mol_type = other DNA
gcactattactggaggttttagagctaccgtcgttgtaccgtctacttgacttttttttcagccaactccaattttttttgtcaagtagacggtacaacgacgg

SEQ ID NO: 463 - DNA, 104 bp, synthetic construct
  source 1..104: mol_type = other DNA
gactgcctaccactggttttagagctaccgtcgttgtaccgtctacttgacttttttttcagccaactccaattttttttgtcaagtagacggtacaacgacgg

SEQ ID NO: 464 - DNA, 104 bp, synthetic construct
  source 1..104: mol_type = other DNA
gtgtatcacattctggttttagagctaccgtcgttgtaccgtctacttgacttttttttcagccaactccaattttttttgtcaagtagacggtacaacgacgg

SEQ ID NO: 465 - DNA, 104 bp, synthetic construct
  source 1..104: mol_type = other DNA
gaagaggtaagtcgtgttttagagctaccgtcgttgtaccgtctacttgacttttttttcagccaactccaattttttttgtcaagtagacggtacaacgacgg

SEQ ID NO: 466 - DNA, 103 bp, synthetic construct
  source 1..103: mol_type = other DNA
gcgcgcggcaatgcgttttagagctaccgtcgttgtaccgtctacttgacttttttttcagccaactccaattttttttgtcaagtagacggtacaacgacgg

SEQ ID NO: 467 - DNA, 104 bp, synthetic construct
  source 1..104: mol_type = other DNA
gaaggagcctagccggttttagagctaccgtcgttgtaccgtctacttgacttttttttcagccaactccaattttttttgtcaagtagacggtacaacgacgg

SEQ ID NO: 468 - DNA, 104 bp, synthetic construct
  source 1..104: mol_type = other DNA
gacgcggtgccccaagttttagagctaccgtcgttgtaccgtctacttgacttttttttcagccaactccaattttttttgtcaagtagacggtacaacgacgg

SEQ ID NO: 469 - DNA, 104 bp, synthetic construct
  source 1..104: mol_type = other DNA
gccttacaggagtttgttttagagctaccttcccgacttccgtaggagcgcttttttttcagccaactccaattttttttgcgctcctacggaagtcgggaagg

SEQ ID NO: 470 - DNA, 104 bp, synthetic construct
  source 1..104: mol_type = other DNA
gcactattactggaggttttagagctaccttcccgacttccgtaggagcgcttttttttcagccaactccaattttttttgcgctcctacggaagtcgggaagg

SEQ ID NO: 471 - DNA, 104 bp, synthetic construct
  source 1..104: mol_type = other DNA
gactgcctaccactggttttagagctaccttcccgacttccgtaggagcgcttttttttcagccaactccaattttttttgcgctcctacggaagtcgggaagg

SEQ ID NO: 472 - DNA, 104 bp, synthetic construct
  source 1..104: mol_type = other DNA
gtgtatcacattctggttttagagctaccttcccgacttccgtaggagcgcttttttttcagccaactccaattttttttgcgctcctacggaagtcgggaagg

SEQ ID NO: 473 - DNA, 104 bp, synthetic construct
  source 1..104: mol_type = other DNA
gaagaggtaagtcgtgttttagagctaccttcccgacttccgtaggagcgcttttttttcagccaactccaattttttttgcgctcctacggaagtcgggaagg

SEQ ID NO: 474 - DNA, 103 bp, synthetic construct
  source 1..103: mol_type = other DNA
gcgcgcggcaatgcgttttagagctaccttcccgacttccgtaggagcgcttttttttcagccaactccaattttttttgcgctcctacggaagtcgggaagg

SEQ ID NO: 475 - DNA, 104 bp, synthetic construct
  source 1..104: mol_type = other DNA
gaaggagcctagccggttttagagctaccttcccgacttccgtaggagcgcttttttttcagccaactccaattttttttgcgctcctacggaagtcgggaagg

SEQ ID NO: 476 - DNA, 104 bp, synthetic construct
  source 1..104: mol_type = other DNA
gacgcggtgccccaagttttagagctaccttcccgacttccgtaggagcgcttttttttcagccaactccaattttttttgcgctcctacggaagtcgggaagg

SEQ ID NO: 477 - DNA, 104 bp, synthetic construct
  source 1..104: mol_type = other DNA
gccttacaggagtttgttttagagctacctgaaggtaaagatcgggtcctcttttttttcagccaactccaattttttttgaggacccgatctttaccttcagg

SEQ ID NO: 478 - DNA, 104 bp, synthetic construct
  source 1..104: mol_type = other DNA
gcactattactggaggttttagagctacctgaaggtaaagatcgggtcctcttttttttcagccaactccaattttttttgaggacccgatctttaccttcagg

SEQ ID NO: 479 - DNA, 104 bp, synthetic construct
  source 1..104: mol_type = other DNA
gactgcctaccactggttttagagctacctgaaggtaaagatcgggtcctcttttttttcagccaactccaattttttttgaggacccgatctttaccttcagg

SEQ ID NO: 480 - DNA, 104 bp, synthetic construct
  source 1..104: mol_type = other DNA
gtgtatcacattctggttttagagctacctgaaggtaaagatcgggtcctcttttttttcagccaactccaattttttttgaggacccgatctttaccttcagg

SEQ ID NO: 481 - DNA, 104 bp, synthetic construct
  source 1..104: mol_type = other DNA
gaagaggtaagtcgtgttttagagctacctgaaggtaaagatcgggtcctcttttttttcagccaactccaattttttttgaggacccgatctttaccttcagg

SEQ ID NO: 482 - DNA, 103 bp, synthetic construct
  source 1..103: mol_type = other DNA
gcgcgcggcaatgcgttttagagctacctgaaggtaaagatcgggtcctcttttttttcagccaactccaattttttttgaggacccgatctttaccttcagg

SEQ ID NO: 483 - DNA, 104 bp, synthetic construct
  source 1..104: mol_type = other DNA
gaaggagcctagccggttttagagctacctgaaggtaaagatcgggtcctcttttttttcagccaactccaattttttttgaggacccgatctttaccttcagg

SEQ ID NO: 484 - DNA, 104 bp, synthetic construct
  source 1..104: mol_type = other DNA
gacgcggtgccccaagttttagagctacctgaaggtaaagatcgggtcctcttttttttcagccaactccaattttttttgaggacccgatctttaccttcagg

SEQ ID NO: 485 - DNA, 102 bp, synthetic construct
  source 1..102: mol_type = other DNA
gccttacaggagtttgttttagagctacctggttatagcggacgcactgtttttttttcagccaactccaattttttttacagtgcgtccgctataaccagg

SEQ ID NO: 486 - DNA, 102 bp, synthetic construct
  source 1..102: mol_type = other DNA
gcactattactggaggttttagagctacctggttatagcggacgcactgtttttttttcagccaactccaattttttttacagtgcgtccgctataaccagg

SEQ ID NO: 487 - DNA, 102 bp, synthetic construct
  source 1..102: mol_type = other DNA
gactgcctaccactggttttagagctacctggttatagcggacgcactgtttttttttcagccaactccaattttttttacagtgcgtccgctataaccagg

SEQ ID NO: 488 - DNA, 102 bp, synthetic construct
  source 1..102: mol_type = other DNA
gtgtatcacattctggttttagagctacctggttatagcggacgcactgtttttttttcagccaactccaattttttttacagtgcgtccgctataaccagg

SEQ ID NO: 489 - DNA, 102 bp, synthetic construct
  source 1..102: mol_type = other DNA
gaagaggtaagtcgtgttttagagctacctggttatagcggacgcactgtttttttttcagccaactccaattttttttacagtgcgtccgctataaccagg

SEQ ID NO: 490 - DNA, 101 bp, synthetic construct
  source 1..101: mol_type = other DNA
gcgcgcggcaatgcgttttagagctacctggttatagcggacgcactgtttttttttcagccaactccaattttttttacagtgcgtccgctataaccagg

SEQ ID NO: 491 - DNA, 102 bp, synthetic construct
  source 1..102: mol_type = other DNA
gaaggagcctagccggttttagagctacctggttatagcggacgcactgtttttttttcagccaactccaattttttttacagtgcgtccgctataaccagg

SEQ ID NO: 492 - DNA, 102 bp, synthetic construct
  source 1..102: mol_type = other DNA
gacgcggtgccccaagttttagagctacctggttatagcggacgcactgtttttttttcagccaactccaattttttttacagtgcgtccgctataaccagg

SEQ ID NO: 493 - DNA, 102 bp, synthetic construct
  source 1..102: mol_type = other DNA
gccttacaggagtttgttttagagctaccgcatcgtattatctgcgaagcttttttttcagccaactccaattttttttgcttcgcagataatacgatgcgg

SEQ ID NO: 494 - DNA, 102 bp, synthetic construct
  source 1..102: mol_type = other DNA
gcactattactggaggttttagagctaccgcatcgtattatctgcgaagcttttttttcagccaactccaattttttttgcttcgcagataatacgatgcgg

SEQ ID NO: 495 - DNA, 102 bp, synthetic construct
  source 1..102: mol_type = other DNA
gactgcctaccactggttttagagctaccgcatcgtattatctgcgaagcttttttttcagccaactccaattttttttgcttcgcagataatacgatgcgg

SEQ ID NO: 496 - DNA, 102 bp, synthetic construct
  source 1..102: mol_type = other DNA
gtgtatcacattctggttttagagctaccgcatcgtattatctgcgaagcttttttttcagccaactccaattttttttgcttcgcagataatacgatgcgg

SEQ ID NO: 497 - DNA, 102 bp, synthetic construct
  source 1..102: mol_type = other DNA
gaagaggtaagtcgtgttttagagctaccgcatcgtattatctgcgaagcttttttttcagccaactccaattttttttgcttcgcagataatacgatgcgg

SEQ ID NO: 498 - DNA, 101 bp, synthetic construct
  source 1..101: mol_type = other DNA
gcgcgcggcaatgcgttttagagctaccgcatcgtattatctgcgaagcttttttttcagccaactccaattttttttgcttcgcagataatacgatgcgg

SEQ ID NO: 499 - DNA, 102 bp, synthetic construct
  source 1..102: mol_type = other DNA
gaaggagcctagccggttttagagctaccgcatcgtattatctgcgaagcttttttttcagccaactccaattttttttgcttcgcagataatacgatgcgg

SEQ ID NO: 500 - DNA, 102 bp, synthetic construct
  source 1..102: mol_type = other DNA
gacgcggtgccccaagttttagagctaccgcatcgtattatctgcgaagcttttttttcagccaactccaattttttttgcttcgcagataatacgatgcgg

SEQ ID NO: 501 - DNA, 102 bp, synthetic construct
  source 1..102: mol_type = other DNA
gccttacaggagtttgttttagagctaccgctaggacgttcaacggagtcttttttttcagccaactccaattttttttgactccgttgaacgtcctagcgg

SEQ ID NO: 502 - DNA, 102 bp, synthetic construct
  source 1..102: mol_type = other DNA
gcactattactggaggttttagagctaccgctaggacgttcaacggagtcttttttttcagccaactccaattttttttgactccgttgaacgtcctagcgg

SEQ ID NO: 503 - DNA, 102 bp, synthetic construct
  source 1..102: mol_type = other DNA
gactgcctaccactggttttagagctaccgctaggacgttcaacggagtcttttttttcagccaactccaattttttttgactccgttgaacgtcctagcgg

SEQ ID NO: 504 - DNA, 102 bp, synthetic construct
  source 1..102: mol_type = other DNA
gtgtatcacattctggttttagagctaccgctaggacgttcaacggagtcttttttttcagccaactccaattttttttgactccgttgaacgtcctagcgg

SEQ ID NO: 505 - DNA, 102 bp, synthetic construct
  source 1..102: mol_type = other DNA
gaagaggtaagtcgtgttttagagctaccgctaggacgttcaacggagtcttttttttcagccaactccaattttttttgactccgttgaacgtcctagcgg

SEQ ID NO: 506 - DNA, 101 bp, synthetic construct
  source 1..101: mol_type = other DNA
gcgcgcggcaatgcgttttagagctaccgctaggacgttcaacggagtcttttttttcagccaactccaattttttttgactccgttgaacgtcctagcgg

SEQ ID NO: 507 - DNA, 102 bp, synthetic construct
  source 1..102: mol_type = other DNA
gaaggagcctagccggttttagagctaccgctaggacgttcaacggagtcttttttttcagccaactccaattttttttgactccgttgaacgtcctagcgg

SEQ ID NO: 508 - DNA, 102 bp, synthetic construct
  source 1..102: mol_type = other DNA
gacgcggtgccccaagttttagagctaccgctaggacgttcaacggagtcttttttttcagccaactccaattttttttgactccgttgaacgtcctagcgg

SEQ ID NO: 509 - DNA, 102 bp, synthetic construct
  source 1..102: mol_type = other DNA
gccttacaggagtttgttttagagctaccatagcggtactatcggcatctttttttttcagccaactccaattttttttagatgccgatagtaccgctatgg

SEQ ID NO: 510 - DNA, 102 bp, synthetic construct
  source 1..102: mol_type = other DNA
gcactattactggaggttttagagctaccatagcggtactatcggcatctttttttttcagccaactccaattttttttagatgccgatagtaccgctatgg

SEQ ID NO: 511 - DNA, 102 bp, synthetic construct
  source 1..102: mol_type = other DNA
gactgcctaccactggttttagagctaccatagcggtactatcggcatctttttttttcagccaactccaattttttttagatgccgatagtaccgctatgg

SEQ ID NO: 512 - DNA, 102 bp, synthetic construct
  source 1..102: mol_type = other DNA
gtgtatcacattctggttttagagctaccatagcggtactatcggcatctttttttttcagccaactccaattttttttagatgccgatagtaccgctatgg

SEQ ID NO: 513 - DNA, 102 bp, synthetic construct
  source 1..102: mol_type = other DNA
gaagaggtaagtcgtgttttagagctaccatagcggtactatcggcatctttttttttcagccaactccaattttttttagatgccgatagtaccgctatgg

SEQ ID NO: 514 - DNA, 101 bp, synthetic construct
  source 1..101: mol_type = other DNA
gcgcgcggcaatgcgttttagagctaccatagcggtactatcggcatctttttttttcagccaactccaattttttttagatgccgatagtaccgctatgg

SEQ ID NO: 515 - DNA, 102 bp, synthetic construct
  source 1..102: mol_type = other DNA
gaaggagcctagccggttttagagctaccatagcggtactatcggcatctttttttttcagccaactccaattttttttagatgccgatagtaccgctatgg

SEQ ID NO: 516 - DNA, 102 bp, synthetic construct
  source 1..102: mol_type = other DNA
gacgcggtgccccaagttttagagctaccatagcggtactatcggcatctttttttttcagccaactccaattttttttagatgccgatagtaccgctatgg

SEQ ID NO: 517 - DNA, 102 bp, synthetic construct
  source 1..102: mol_type = other DNA
gccttacaggagtttgttttagagctacctcgtactagtctcgcatgaccttttttttcagccaactccaattttttttggtcatgcgagactagtacgagg

SEQ ID NO: 518 - DNA, 102 bp, synthetic construct
  source 1..102: mol_type = other DNA
gcactattactggaggttttagagctacctcgtactagtctcgcatgaccttttttttcagccaactccaattttttttggtcatgcgagactagtacgagg

SEQ ID NO: 519 - DNA, 102 bp, synthetic construct
  source 1..102: mol_type = other DNA
gactgcctaccactggttttagagctacctcgtactagtctcgcatgaccttttttttcagccaactccaattttttttggtcatgcgagactagtacgagg

SEQ ID NO: 520 - DNA, 102 bp, synthetic construct
  source 1..102: mol_type = other DNA
gtgtatcacattctggttttagagctacctcgtactagtctcgcatgaccttttttttcagccaactccaattttttttggtcatgcgagactagtacgagg

SEQ ID NO: 521 - DNA, 102 bp, synthetic construct
  source 1..102: mol_type = other DNA
gaagaggtaagtcgtgttttagagctacctcgtactagtctcgcatgaccttttttttcagccaactccaattttttttggtcatgcgagactagtacgagg

SEQ ID NO: 522 - DNA, 101 bp, synthetic construct
  source 1..101: mol_type = other DNA
gcgcgcggcaatgcgttttagagctacctcgtactagtctcgcatgaccttttttttcagccaactccaattttttttggtcatgcgagactagtacgagg

SEQ ID NO: 523 - DNA, 102 bp, synthetic construct
  source 1..102: mol_type = other DNA
gaaggagcctagccggttttagagctacctcgtactagtctcgcatgaccttttttttcagccaactccaattttttttggtcatgcgagactagtacgagg

SEQ ID NO: 524 - DNA, 102 bp, synthetic construct
  source 1..102: mol_type = other DNA
gacgcggtgccccaagttttagagctacctcgtactagtctcgcatgaccttttttttcagccaactccaattttttttggtcatgcgagactagtacgagg

SEQ ID NO: 525 - DNA, 102 bp, synthetic construct
  source 1..102: mol_type = other DNA
gccttacaggagtttgttttagagctaccgatagtgctaaacgacgctttttttttttcagccaactccaattttttttaaagcgtcgtttagcactatcgg

SEQ ID NO: 526 - DNA, 102 bp, synthetic construct
  source 1..102: mol_type = other DNA
gcactattactggaggttttagagctaccgatagtgctaaacgacgctttttttttttcagccaactccaattttttttaaagcgtcgtttagcactatcgg

SEQ ID NO: 527 - DNA, 102 bp, synthetic construct
  source 1..102: mol_type = other DNA
gactgcctaccactggttttagagctaccgatagtgctaaacgacgctttttttttttcagccaactccaattttttttaaagcgtcgtttagcactatcgg

SEQ ID NO: 528 - DNA, 102 bp, synthetic construct
  source 1..102: mol_type = other DNA
gtgtatcacattctggttttagagctaccgatagtgctaaacgacgctttttttttttcagccaactccaattttttttaaagcgtcgtttagcactatcgg

SEQ ID NO: 529 - DNA, 102 bp, synthetic construct
  source 1..102: mol_type = other DNA
gaagaggtaagtcgtgttttagagctaccgatagtgctaaacgacgctttttttttttcagccaactccaattttttttaaagcgtcgtttagcactatcgg

SEQ ID NO: 530 - DNA, 101 bp, synthetic construct
  source 1..101: mol_type = other DNA
gcgcgcggcaatgcgttttagagctaccgatagtgctaaacgacgctttttttttttcagccaactccaattttttttaaagcgtcgtttagcactatcgg

SEQ ID NO: 531 - DNA, 102 bp, synthetic construct
  source 1..102: mol_type = other DNA
gaaggagcctagccggttttagagctaccgatagtgctaaacgacgctttttttttttcagccaactccaattttttttaaagcgtcgtttagcactatcgg

SEQ ID NO: 532 - DNA, 102 bp, synthetic construct
  source 1..102: mol_type = other DNA
gacgcggtgccccaagttttagagctaccgatagtgctaaacgacgctttttttttttcagccaactccaattttttttaaagcgtcgtttagcactatcgg

SEQ ID NO: 533 - DNA, 102 bp, synthetic construct
  source 1..102: mol_type = other DNA
gccttacaggagtttgttttagagctacccgttatcgacgttcaaggaacttttttttcagccaactccaattttttttgttccttgaacgtcgataacggg

SEQ ID NO: 534 - DNA, 102 bp, synthetic construct
  source 1..102: mol_type = other DNA
gcactattactggaggttttagagctacccgttatcgacgttcaaggaacttttttttcagccaactccaattttttttgttccttgaacgtcgataacggg

SEQ ID NO: 535 - DNA, 102 bp, synthetic construct
  source 1..102: mol_type = other DNA
gactgcctaccactggttttagagctacccgttatcgacgttcaaggaacttttttttcagccaactccaattttttttgttccttgaacgtcgataacggg

SEQ ID NO: 536 - DNA, 102 bp, synthetic construct
  source 1..102: mol_type = other DNA
gtgtatcacattctggttttagagctacccgttatcgacgttcaaggaacttttttttcagccaactccaattttttttgttccttgaacgtcgataacggg

SEQ ID NO: 537 - DNA, 102 bp, synthetic construct
  source 1..102: mol_type = other DNA
gaagaggtaagtcgtgttttagagctacccgttatcgacgttcaaggaacttttttttcagccaactccaattttttttgttccttgaacgtcgataacggg

SEQ ID NO: 538 - DNA, 101 bp, synthetic construct
  source 1..101: mol_type = other DNA
gcgcgcggcaatgcgttttagagctacccgttatcgacgttcaaggaacttttttttcagccaactccaattttttttgttccttgaacgtcgataacggg

SEQ ID NO: 539 - DNA, 102 bp, synthetic construct
  source 1..102: mol_type = other DNA
gaaggagcctagccggttttagagctacccgttatcgacgttcaaggaacttttttttcagccaactccaattttttttgttccttgaacgtcgataacggg

SEQ ID NO: 540 - DNA, 102 bp, synthetic construct
  source 1..102: mol_type = other DNA
gacgcggtgccccaagttttagagctacccgttatcgacgttcaaggaacttttttttcagccaactccaattttttttgttccttgaacgtcgataacggg

SEQ ID NO: 541 - DNA, 102 bp, synthetic construct
  source 1..102: mol_type = other DNA
gccttacaggagtttgttttagagctaccgatcaatgcggtctgcgtaacttttttttcagccaactccaattttttttgttacgcagaccgcattgatcgg

SEQ ID NO: 542 - DNA, 102 bp, synthetic construct
  source 1..102: mol_type = other DNA
gcactattactggaggttttagagctaccgatcaatgcggtctgcgtaacttttttttcagccaactccaattttttttgttacgcagaccgcattgatcgg

SEQ ID NO: 543 - DNA, 102 bp, synthetic construct
  source 1..102: mol_type = other DNA
gactgcctaccactggttttagagctaccgatcaatgcggtctgcgtaacttttttttcagccaactccaattttttttgttacgcagaccgcattgatcgg

SEQ ID NO: 544 - DNA, 102 bp, synthetic construct
  source 1..102: mol_type = other DNA
gtgtatcacattctggttttagagctaccgatcaatgcggtctgcgtaacttttttttcagccaactccaattttttttgttacgcagaccgcattgatcgg

SEQ ID NO: 545 - DNA, 102 bp, synthetic construct
  source 1..102: mol_type = other DNA
gaagaggtaagtcgtgttttagagctaccgatcaatgcggtctgcgtaacttttttttcagccaactccaattttttttgttacgcagaccgcattgatcgg

SEQ ID NO: 546 - DNA, 101 bp, synthetic construct
  source 1..101: mol_type = other DNA
gcgcgcggcaatgcgttttagagctaccgatcaatgcggtctgcgtaacttttttttcagccaactccaattttttttgttacgcagaccgcattgatcgg

SEQ ID NO: 547 - DNA, 102 bp, synthetic construct
  source 1..102: mol_type = other DNA
gaaggagcctagccggttttagagctaccgatcaatgcggtctgcgtaacttttttttcagccaactccaattttttttgttacgcagaccgcattgatcgg

SEQ ID NO: 548 - DNA, 102 bp, synthetic construct
  source 1..102: mol_type = other DNA
gacgcggtgccccaagttttagagctaccgatcaatgcggtctgcgtaacttttttttcagccaactccaattttttttgttacgcagaccgcattgatcgg

SEQ ID NO: 549 - DNA, 102 bp, synthetic construct
  source 1..102: mol_type = other DNA
gccttacaggagtttgttttagagctacccttactcgcgatactctcgacttttttttcagccaactccaattttttttgtcgagagtatcgcgagtaaggg

SEQ ID NO: 550 - DNA, 102 bp, synthetic construct
  source 1..102: mol_type = other DNA
gcactattactggaggttttagagctacccttactcgcgatactctcgacttttttttcagccaactccaattttttttgtcgagagtatcgcgagtaaggg

SEQ ID NO: 551 - DNA, 102 bp, synthetic construct
  source 1..102: mol_type = other DNA
gactgcctaccactggttttagagctacccttactcgcgatactctcgacttttttttcagccaactccaattttttttgtcgagagtatcgcgagtaaggg

SEQ ID NO: 552 - DNA, 102 bp, synthetic construct
  source 1..102: mol_type = other DNA
gtgtatcacattctggttttagagctacccttactcgcgatactctcgacttttttttcagccaactccaattttttttgtcgagagtatcgcgagtaaggg

SEQ ID NO: 553 - DNA, 102 bp, synthetic construct
  source 1..102: mol_type = other DNA
gaagaggtaagtcgtgttttagagctacccttactcgcgatactctcgacttttttttcagccaactccaattttttttgtcgagagtatcgcgagtaaggg

SEQ ID NO: 554 - DNA, 101 bp, synthetic construct
  source 1..101: mol_type = other DNA
gcgcgcggcaatgcgttttagagctacccttactcgcgatactctcgacttttttttcagccaactccaattttttttgtcgagagtatcgcgagtaaggg

SEQ ID NO: 555 - DNA, 102 bp, synthetic construct
  source 1..102: mol_type = other DNA
gaaggagcctagccggttttagagctacccttactcgcgatactctcgacttttttttcagccaactccaattttttttgtcgagagtatcgcgagtaaggg

SEQ ID NO: 556 - DNA, 102 bp, synthetic construct
  source 1..102: mol_type = other DNA
gacgcggtgccccaagttttagagctacccttactcgcgatactctcgacttttttttcagccaactccaattttttttgtcgagagtatcgcgagtaaggg

SEQ ID NO: 557 - DNA, 102 bp, synthetic construct
  source 1..102: mol_type = other DNA
gccttacaggagtttgttttagagctaccgcggacggtaagcacggaatattttttttcagccaactccaatttttttttattccgtgcttaccgtccgcgg

SEQ ID NO: 558 - DNA, 102 bp, synthetic construct
  source 1..102: mol_type = other DNA
gcactattactggaggttttagagctaccgcggacggtaagcacggaatattttttttcagccaactccaatttttttttattccgtgcttaccgtccgcgg

SEQ ID NO: 559 - DNA, 102 bp, synthetic construct
  source 1..102: mol_type = other DNA
gactgcctaccactggttttagagctaccgcggacggtaagcacggaatattttttttcagccaactccaatttttttttattccgtgcttaccgtccgcgg

SEQ ID NO: 560 - DNA, 102 bp, synthetic construct
  source 1..102: mol_type = other DNA
gtgtatcacattctggttttagagctaccgcggacggtaagcacggaatattttttttcagccaactccaatttttttttattccgtgcttaccgtccgcgg

SEQ ID NO: 561 - DNA, 102 bp, synthetic construct
  source 1..102: mol_type = other DNA
gaagaggtaagtcgtgttttagagctaccgcggacggtaagcacggaatattttttttcagccaactccaatttttttttattccgtgcttaccgtccgcgg

SEQ ID NO: 562 - DNA, 101 bp, synthetic construct
  source 1..101: mol_type = other DNA
gcgcgcggcaatgcgttttagagctaccgcggacggtaagcacggaatattttttttcagccaactccaatttttttttattccgtgcttaccgtccgcgg

SEQ ID NO: 563 - DNA, 102 bp, synthetic construct
  source 1..102: mol_type = other DNA
gaaggagcctagccggttttagagctaccgcggacggtaagcacggaatattttttttcagccaactccaatttttttttattccgtgcttaccgtccgcgg

SEQ ID NO: 564 - DNA, 102 bp, synthetic construct
  source 1..102: mol_type = other DNA
gacgcggtgccccaagttttagagctaccgcggacggtaagcacggaatattttttttcagccaactccaatttttttttattccgtgcttaccgtccgcgg

SEQ ID NO: 565 - DNA, 102 bp, synthetic construct
  source 1..102: mol_type = other DNA
gccttacaggagtttgttttagagctacctatagtcacgaatcgtagggtttttttttcagccaactccaattttttttaccctacgattcgtgactatagg

SEQ ID NO: 566 - DNA, 102 bp, synthetic construct
  source 1..102: mol_type = other DNA
gcactattactggaggttttagagctacctatagtcacgaatcgtagggtttttttttcagccaactccaattttttttaccctacgattcgtgactatagg

SEQ ID NO: 567 - DNA, 102 bp, synthetic construct
  source 1..102: mol_type = other DNA
gactgcctaccactggttttagagctacctatagtcacgaatcgtagggtttttttttcagccaactccaattttttttaccctacgattcgtgactatagg

SEQ ID NO: 568 - DNA, 102 bp, synthetic construct
  source 1..102: mol_type = other DNA
gtgtatcacattctggttttagagctacctatagtcacgaatcgtagggtttttttttcagccaactccaattttttttaccctacgattcgtgactatagg

SEQ ID NO: 569 - DNA, 102 bp, synthetic construct
  source 1..102: mol_type = other DNA
gaagaggtaagtcgtgttttagagctacctatagtcacgaatcgtagggtttttttttcagccaactccaattttttttaccctacgattcgtgactatagg

SEQ ID NO: 570 - DNA, 101 bp, synthetic construct
  source 1..101: mol_type = other DNA
gcgcgcggcaatgcgttttagagctacctatagtcacgaatcgtagggtttttttttcagccaactccaattttttttaccctacgattcgtgactatagg

SEQ ID NO: 571 - DNA, 102 bp, synthetic construct
  source 1..102: mol_type = other DNA
gaaggagcctagccggttttagagctacctatagtcacgaatcgtagggtttttttttcagccaactccaattttttttaccctacgattcgtgactatagg

SEQ ID NO: 572 - DNA, 102 bp, synthetic construct
  source 1..102: mol_type = other DNA
gacgcggtgccccaagttttagagctacctatagtcacgaatcgtagggtttttttttcagccaactccaattttttttaccctacgattcgtgactatagg

SEQ ID NO: 573 - DNA, 102 bp, synthetic construct
  source 1..102: mol_type = other DNA
gccttacaggagtttgttttagagctacccgtcgtcacgtatgcgtagcattttttttcagccaactccaatttttttttgctacgcatacgtgacgacggg

SEQ ID NO: 574 - DNA, 102 bp, synthetic construct
  source 1..102: mol_type = other DNA
gcactattactggaggttttagagctacccgtcgtcacgtatgcgtagcattttttttcagccaactccaatttttttttgctacgcatacgtgacgacggg

SEQ ID NO: 575 - DNA, 102 bp, synthetic construct
  source 1..102: mol_type = other DNA
gactgcctaccactggttttagagctacccgtcgtcacgtatgcgtagcattttttttcagccaactccaatttttttttgctacgcatacgtgacgacggg

SEQ ID NO: 576 - DNA, 102 bp, synthetic construct
  source 1..102: mol_type = other DNA
gtgtatcacattctggttttagagctacccgtcgtcacgtatgcgtagcattttttttcagccaactccaatttttttttgctacgcatacgtgacgacggg

SEQ ID NO: 577 - DNA, 102 bp, synthetic construct
  source 1..102: mol_type = other DNA
gaagaggtaagtcgtgttttagagctacccgtcgtcacgtatgcgtagcattttttttcagccaactccaatttttttttgctacgcatacgtgacgacggg

SEQ ID NO: 578 - DNA, 101 bp, synthetic construct
  source 1..101: mol_type = other DNA
gcgcgcggcaatgcgttttagagctacccgtcgtcacgtatgcgtagcattttttttcagccaactccaatttttttttgctacgcatacgtgacgacggg

SEQ ID NO: 579 - DNA, 102 bp, synthetic construct
  source 1..102: mol_type = other DNA
gaaggagcctagccggttttagagctacccgtcgtcacgtatgcgtagcattttttttcagccaactccaatttttttttgctacgcatacgtgacgacggg

SEQ ID NO: 580 - DNA, 102 bp, synthetic construct
  source 1..102: mol_type = other DNA
gacgcggtgccccaagttttagagctacccgtcgtcacgtatgcgtagcattttttttcagccaactccaatttttttttgctacgcatacgtgacgacggg

SEQ ID NO: 581 - DNA, 102 bp, synthetic construct
  source 1..102: mol_type = other DNA
gccttacaggagtttgttttagagctacccgagaggtagtagacgacgcattttttttcagccaactccaatttttttttgcgtcgtctactacctctcggg

SEQ ID NO: 582 - DNA, 102 bp, synthetic construct
  source 1..102: mol_type = other DNA
gcactattactggaggttttagagctacccgagaggtagtagacgacgcattttttttcagccaactccaatttttttttgcgtcgtctactacctctcggg

SEQ ID NO: 583 - DNA, 102 bp, synthetic construct
  source 1..102: mol_type = other DNA
gactgcctaccactggttttagagctacccgagaggtagtagacgacgcattttttttcagccaactccaatttttttttgcgtcgtctactacctctcggg

SEQ ID NO: 584 - DNA, 102 bp, synthetic construct
  source 1..102: mol_type = other DNA
gtgtatcacattctggttttagagctacccgagaggtagtagacgacgcattttttttcagccaactccaatttttttttgcgtcgtctactacctctcggg

SEQ ID NO: 585 - DNA, 102 bp, synthetic construct
  source 1..102: mol_type = other DNA
gaagaggtaagtcgtgttttagagctacccgagaggtagtagacgacgcattttttttcagccaactccaatttttttttgcgtcgtctactacctctcggg

SEQ ID NO: 586 - DNA, 101 bp, synthetic construct
  source 1..101: mol_type = other DNA
gcgcgcggcaatgcgttttagagctacccgagaggtagtagacgacgcattttttttcagccaactccaatttttttttgcgtcgtctactacctctcggg

SEQ ID NO: 587 - DNA, 102 bp, synthetic construct
  source 1..102: mol_type = other DNA
gaaggagcctagccggttttagagctacccgagaggtagtagacgacgcattttttttcagccaactccaatttttttttgcgtcgtctactacctctcggg

SEQ ID NO: 588 - DNA, 102 bp, synthetic construct
  source 1..102: mol_type = other DNA
gacgcggtgccccaagttttagagctacccgagaggtagtagacgacgcattttttttcagccaactccaatttttttttgcgtcgtctactacctctcggg

SEQ ID NO: 589 - DNA, 102 bp, synthetic construct
  source 1..102: mol_type = other DNA
gccttacaggagtttgttttagagctaccgacgtctacggacgggagctattttttttcagccaactccaatttttttttagctcccgtccgtagacgtcgg

SEQ ID NO: 590 - DNA, 102 bp, synthetic construct
  source 1..102: mol_type = other DNA
gcactattactggaggttttagagctaccgacgtctacggacgggagctattttttttcagccaactccaatttttttttagctcccgtccgtagacgtcgg

SEQ ID NO: 591 - DNA, 102 bp, synthetic construct
  source 1..102: mol_type = other DNA
gactgcctaccactggttttagagctaccgacgtctacggacgggagctattttttttcagccaactccaatttttttttagctcccgtccgtagacgtcgg

SEQ ID NO: 592 - DNA, 102 bp, synthetic construct
  source 1..102: mol_type = other DNA
gtgtatcacattctggttttagagctaccgacgtctacggacgggagctattttttttcagccaactccaatttttttttagctcccgtccgtagacgtcgg

SEQ ID NO: 593 - DNA, 102 bp, synthetic construct
  source 1..102: mol_type = other DNA
gaagaggtaagtcgtgttttagagctaccgacgtctacggacgggagctattttttttcagccaactccaatttttttttagctcccgtccgtagacgtcgg

SEQ ID NO: 594 - DNA, 101 bp, synthetic construct
  source 1..101: mol_type = other DNA
gcgcgcggcaatgcgttttagagctaccgacgtctacggacgggagctattttttttcagccaactccaatttttttttagctcccgtccgtagacgtcgg

SEQ ID NO: 595 - DNA, 102 bp, synthetic construct
  source 1..102: mol_type = other DNA
gaaggagcctagccggttttagagctaccgacgtctacggacgggagctattttttttcagccaactccaatttttttttagctcccgtccgtagacgtcgg

SEQ ID NO: 596 - DNA, 102 bp, synthetic construct
  source 1..102: mol_type = other DNA
gacgcggtgccccaagttttagagctaccgacgtctacggacgggagctattttttttcagccaactccaatttttttttagctcccgtccgtagacgtcgg

SEQ ID NO: 597 - DNA, 102 bp, synthetic construct
  source 1..102: mol_type = other DNA
gccttacaggagtttgttttagagctaccaaagctcattcgcgactgagcttttttttcagccaactccaattttttttgctcagtcgcgaatgagctttgg

SEQ ID NO: 598 - DNA, 102 bp, synthetic construct
  source 1..102: mol_type = other DNA
gcactattactggaggttttagagctaccaaagctcattcgcgactgagcttttttttcagccaactccaattttttttgctcagtcgcgaatgagctttgg

SEQ ID NO: 599 - DNA, 102 bp, synthetic construct
  source 1..102: mol_type = other DNA
gactgcctaccactggttttagagctaccaaagctcattcgcgactgagcttttttttcagccaactccaattttttttgctcagtcgcgaatgagctttgg

SEQ ID NO: 600 - DNA, 102 bp, synthetic construct
  source 1..102: mol_type = other DNA
gtgtatcacattctggttttagagctaccaaagctcattcgcgactgagcttttttttcagccaactccaattttttttgctcagtcgcgaatgagctttgg

SEQ ID NO: 601 - DNA, 102 bp, synthetic construct
  source 1..102: mol_type = other DNA
gaagaggtaagtcgtgttttagagctaccaaagctcattcgcgactgagcttttttttcagccaactccaattttttttgctcagtcgcgaatgagctttgg

SEQ ID NO: 602 - DNA, 101 bp, synthetic construct
  source 1..101: mol_type = other DNA
gcgcgcggcaatgcgttttagagctaccaaagctcattcgcgactgagcttttttttcagccaactccaattttttttgctcagtcgcgaatgagctttgg

SEQ ID NO: 603 - DNA, 102 bp, synthetic construct
  source 1..102: mol_type = other DNA
gaaggagcctagccggttttagagctaccaaagctcattcgcgactgagcttttttttcagccaactccaattttttttgctcagtcgcgaatgagctttgg

SEQ ID NO: 604 - DNA, 102 bp, synthetic construct
  source 1..102: mol_type = other DNA
gacgcggtgccccaagttttagagctaccaaagctcattcgcgactgagcttttttttcagccaactccaattttttttgctcagtcgcgaatgagctttgg

SEQ ID NO: 605 - DNA, 102 bp, synthetic construct
  source 1..102: mol_type = other DNA
gccttacaggagtttgttttagagctaccatggcacgatcgacacggaggttttttttcagccaactccaattttttttcctccgtgtcgatcgtgccatgg

SEQ ID NO: 606 - DNA, 102 bp, synthetic construct
  source 1..102: mol_type = other DNA
gcactattactggaggttttagagctaccatggcacgatcgacacggaggttttttttcagccaactccaattttttttcctccgtgtcgatcgtgccatgg

SEQ ID NO: 607 - DNA, 102 bp, synthetic construct
  source 1..102: mol_type = other DNA
gactgcctaccactggttttagagctaccatggcacgatcgacacggaggttttttttcagccaactccaattttttttcctccgtgtcgatcgtgccatgg

SEQ ID NO: 608 - DNA, 102 bp, synthetic construct
  source 1..102: mol_type = other DNA
gtgtatcacattctggttttagagctaccatggcacgatcgacacggaggttttttttcagccaactccaattttttttcctccgtgtcgatcgtgccatgg

SEQ ID NO: 609 - DNA, 102 bp, synthetic construct
  source 1..102: mol_type = other DNA
gaagaggtaagtcgtgttttagagctaccatggcacgatcgacacggaggttttttttcagccaactccaattttttttcctccgtgtcgatcgtgccatgg

SEQ ID NO: 610 - DNA, 101 bp, synthetic construct
  source 1..101: mol_type = other DNA
gcgcgcggcaatgcgttttagagctaccatggcacgatcgacacggaggttttttttcagccaactccaattttttttcctccgtgtcgatcgtgccatgg

SEQ ID NO: 611 - DNA, 102 bp, synthetic construct
  source 1..102: mol_type = other DNA
gaaggagcctagccggttttagagctaccatggcacgatcgacacggaggttttttttcagccaactccaattttttttcctccgtgtcgatcgtgccatgg

SEQ ID NO: 612 - DNA, 102 bp, synthetic construct
  source 1..102: mol_type = other DNA
gacgcggtgccccaagttttagagctaccatggcacgatcgacacggaggttttttttcagccaactccaattttttttcctccgtgtcgatcgtgccatgg

SEQ ID NO: 613 - DNA, 102 bp, synthetic construct
  source 1..102: mol_type = other DNA
gccttacaggagtttgttttagagctacccgaactctctatcgaacgagtttttttttcagccaactccaattttttttactcgttcgatagagagttcggg

SEQ ID NO: 614 - DNA, 102 bp, synthetic construct
  source 1..102: mol_type = other DNA
gcactattactggaggttttagagctacccgaactctctatcgaacgagtttttttttcagccaactccaattttttttactcgttcgatagagagttcggg

SEQ ID NO: 615 - DNA, 102 bp, synthetic construct
  source 1..102: mol_type = other DNA
gactgcctaccactggttttagagctacccgaactctctatcgaacgagtttttttttcagccaactccaattttttttactcgttcgatagagagttcggg

SEQ ID NO: 616 - DNA, 102 bp, synthetic construct
  source 1..102: mol_type = other DNA
gtgtatcacattctggttttagagctacccgaactctctatcgaacgagtttttttttcagccaactccaattttttttactcgttcgatagagagttcggg

SEQ ID NO: 617 - DNA, 102 bp, synthetic construct
  source 1..102: mol_type = other DNA
gaagaggtaagtcgtgttttagagctacccgaactctctatcgaacgagtttttttttcagccaactccaattttttttactcgttcgatagagagttcggg

SEQ ID NO: 618 - DNA, 101 bp, synthetic construct
  source 1..101: mol_type = other DNA
gcgcgcggcaatgcgttttagagctacccgaactctctatcgaacgagtttttttttcagccaactccaattttttttactcgttcgatagagagttcggg

SEQ ID NO: 619 - DNA, 102 bp, synthetic construct
  source 1..102: mol_type = other DNA
gaaggagcctagccggttttagagctacccgaactctctatcgaacgagtttttttttcagccaactccaattttttttactcgttcgatagagagttcggg

SEQ ID NO: 620 - DNA, 102 bp, synthetic construct
  source 1..102: mol_type = other DNA
gacgcggtgccccaagttttagagctacccgaactctctatcgaacgagtttttttttcagccaactccaattttttttactcgttcgatagagagttcggg

SEQ ID NO: 621 - DNA, 102 bp, synthetic construct
  source 1..102: mol_type = other DNA
gccttacaggagtttgttttagagctacctacacgatagtggtcgtgcgcttttttttcagccaactccaattttttttgcgcacgaccactatcgtgtagg

SEQ ID NO: 622 - DNA, 102 bp, synthetic construct
  source 1..102: mol_type = other DNA
gcactattactggaggttttagagctacctacacgatagtggtcgtgcgcttttttttcagccaactccaattttttttgcgcacgaccactatcgtgtagg

SEQ ID NO: 623 - DNA, 102 bp, synthetic construct
  source 1..102: mol_type = other DNA
gactgcctaccactggttttagagctacctacacgatagtggtcgtgcgcttttttttcagccaactccaattttttttgcgcacgaccactatcgtgtagg

SEQ ID NO: 624 - DNA, 102 bp, synthetic construct
  source 1..102: mol_type = other DNA
gtgtatcacattctggttttagagctacctacacgatagtggtcgtgcgcttttttttcagccaactccaattttttttgcgcacgaccactatcgtgtagg

SEQ ID NO: 625 - DNA, 102 bp, synthetic construct
  source 1..102: mol_type = other DNA
gaagaggtaagtcgtgttttagagctacctacacgatagtggtcgtgcgcttttttttcagccaactccaattttttttgcgcacgaccactatcgtgtagg

SEQ ID NO: 626 - DNA, 101 bp, synthetic construct
  source 1..101: mol_type = other DNA
gcgcgcggcaatgcgttttagagctacctacacgatagtggtcgtgcgcttttttttcagccaactccaattttttttgcgcacgaccactatcgtgtagg

SEQ ID NO: 627 - DNA, 102 bp, synthetic construct
  source 1..102: mol_type = other DNA
gaaggagcctagccggttttagagctacctacacgatagtggtcgtgcgcttttttttcagccaactccaattttttttgcgcacgaccactatcgtgtagg

SEQ ID NO: 628 - DNA, 102 bp, synthetic construct
  source 1..102: mol_type = other DNA
gacgcggtgccccaagttttagagctacctacacgatagtggtcgtgcgcttttttttcagccaactccaattttttttgcgcacgaccactatcgtgtagg

SEQ ID NO: 629 - DNA, 102 bp, synthetic construct
  source 1..102: mol_type = other DNA
gccttacaggagtttgttttagagctaccctggcggaacgttcgagtaatttttttttcagccaactccaattttttttattactcgaacgttccgccaggg

SEQ ID NO: 630 - DNA, 102 bp, synthetic construct
  source 1..102: mol_type = other DNA
gcactattactggaggttttagagctaccctggcggaacgttcgagtaatttttttttcagccaactccaattttttttattactcgaacgttccgccaggg

SEQ ID NO: 631 - DNA, 102 bp, synthetic construct
  source 1..102: mol_type = other DNA
gactgcctaccactggttttagagctaccctggcggaacgttcgagtaatttttttttcagccaactccaattttttttattactcgaacgttccgccaggg

SEQ ID NO: 632 - DNA, 102 bp, synthetic construct
  source 1..102: mol_type = other DNA
gtgtatcacattctggttttagagctaccctggcggaacgttcgagtaatttttttttcagccaactccaattttttttattactcgaacgttccgccaggg

SEQ ID NO: 633 - DNA, 102 bp, synthetic construct
  source 1..102: mol_type = other DNA
gaagaggtaagtcgtgttttagagctaccctggcggaacgttcgagtaatttttttttcagccaactccaattttttttattactcgaacgttccgccaggg

SEQ ID NO: 634 - DNA, 101 bp, synthetic construct
  source 1..101: mol_type = other DNA
gcgcgcggcaatgcgttttagagctaccctggcggaacgttcgagtaatttttttttcagccaactccaattttttttattactcgaacgttccgccaggg

SEQ ID NO: 635 - DNA, 102 bp, synthetic construct
  source 1..102: mol_type = other DNA
gaaggagcctagccggttttagagctaccctggcggaacgttcgagtaatttttttttcagccaactccaattttttttattactcgaacgttccgccaggg

SEQ ID NO: 636 - DNA, 102 bp, synthetic construct
  source 1..102: mol_type = other DNA
gacgcggtgccccaagttttagagctaccctggcggaacgttcgagtaatttttttttcagccaactccaattttttttattactcgaacgttccgccaggg

SEQ ID NO: 637 - DNA, 102 bp, synthetic construct
  source 1..102: mol_type = other DNA
gccttacaggagtttgttttagagctacctacactcgacatcggtagctattttttttcagccaactccaatttttttttagctaccgatgtcgagtgtagg

SEQ ID NO: 638 - DNA, 102 bp, synthetic construct
  source 1..102: mol_type = other DNA
gcactattactggaggttttagagctacctacactcgacatcggtagctattttttttcagccaactccaatttttttttagctaccgatgtcgagtgtagg

SEQ ID NO: 639 - DNA, 102 bp, synthetic construct
  source 1..102: mol_type = other DNA
gactgcctaccactggttttagagctacctacactcgacatcggtagctattttttttcagccaactccaatttttttttagctaccgatgtcgagtgtagg

SEQ ID NO: 640 - DNA, 102 bp, synthetic construct
  source 1..102: mol_type = other DNA
gtgtatcacattctggttttagagctacctacactcgacatcggtagctattttttttcagccaactccaatttttttttagctaccgatgtcgagtgtagg

SEQ ID NO: 641 - DNA, 102 bp, synthetic construct
  source 1..102: mol_type = other DNA
gaagaggtaagtcgtgttttagagctacctacactcgacatcggtagctattttttttcagccaactccaatttttttttagctaccgatgtcgagtgtagg

SEQ ID NO: 642 - DNA, 101 bp, synthetic construct
  source 1..101: mol_type = other DNA
gcgcgcggcaatgcgttttagagctacctacactcgacatcggtagctattttttttcagccaactccaatttttttttagctaccgatgtcgagtgtagg

SEQ ID NO: 643 - DNA, 102 bp, synthetic construct
  source 1..102: mol_type = other DNA
gaaggagcctagccggttttagagctacctacactcgacatcggtagctattttttttcagccaactccaatttttttttagctaccgatgtcgagtgtagg

SEQ ID NO: 644 - DNA, 102 bp, synthetic construct
  source 1..102: mol_type = other DNA
gacgcggtgccccaagttttagagctacctacactcgacatcggtagctattttttttcagccaactccaatttttttttagctaccgatgtcgagtgtagg

SEQ ID NO: 645 - DNA, 104 bp, synthetic construct
  source 1..104: mol_type = other DNA
gtaaccacacaatgagttttagagctaccgtcgttgtaccgtctacttgacttttttttcagccaactccaattttttttgtcaagtagacggtacaacgacgg

SEQ ID NO: 646 - DNA, 104 bp, synthetic construct
  source 1..104: mol_type = other DNA
gactctcttgtattcgttttagagctaccgtcgttgtaccgtctacttgacttttttttcagccaactccaattttttttgtcaagtagacggtacaacgacgg

SEQ ID NO: 647 - DNA, 104 bp, synthetic construct
  source 1..104: mol_type = other DNA
gaacaatggccaagcgttttagagctaccgtcgttgtaccgtctacttgacttttttttcagccaactccaattttttttgtcaagtagacggtacaacgacgg

SEQ ID NO: 648 - DNA, 104 bp, synthetic construct
  source 1..104: mol_type = other DNA
gttctgtcttcaatagttttagagctaccgtcgttgtaccgtctacttgacttttttttcagccaactccaattttttttgtcaagtagacggtacaacgacgg

SEQ ID NO: 649 - DNA, 104 bp, synthetic construct
  source 1..104: mol_type = other DNA
gctctagacaacctcgttttagagctaccgtcgttgtaccgtctacttgacttttttttcagccaactccaattttttttgtcaagtagacggtacaacgacgg

SEQ ID NO: 650 - DNA, 103 bp, synthetic construct
  source 1..103: mol_type = other DNA
gacaagttgtttacgttttagagctaccgtcgttgtaccgtctacttgacttttttttcagccaactccaattttttttgtcaagtagacggtacaacgacgg

SEQ ID NO: 651 - DNA, 104 bp, synthetic construct
  source 1..104: mol_type = other DNA
gagagagcctagaaagttttagagctaccgtcgttgtaccgtctacttgacttttttttcagccaactccaattttttttgtcaagtagacggtacaacgacgg

SEQ ID NO: 652 - DNA, 103 bp, synthetic construct
  source 1..103: mol_type = other DNA
ggtcaaggagtcctgttttagagctaccgtcgttgtaccgtctacttgacttttttttcagccaactccaattttttttgtcaagtagacggtacaacgacgg

SEQ ID NO: 653 - DNA, 104 bp, synthetic construct
  source 1..104: mol_type = other DNA
gttgagagcaacacggttttagagctaccgtcgttgtaccgtctacttgacttttttttcagccaactccaattttttttgtcaagtagacggtacaacgacgg

SEQ ID NO: 654 - DNA, 104 bp, synthetic construct
  source 1..104: mol_type = other DNA
gtcatgaccagcaaagttttagagctaccgtcgttgtaccgtctacttgacttttttttcagccaactccaattttttttgtcaagtagacggtacaacgacgg

SEQ ID NO: 655 - DNA, 104 bp, synthetic construct
  source 1..104: mol_type = other DNA
gcggtcaccgcggccgttttagagctaccgtcgttgtaccgtctacttgacttttttttcagccaactccaattttttttgtcaagtagacggtacaacgacgg

SEQ ID NO: 656 - DNA, 103 bp, synthetic construct
  source 1..103: mol_type = other DNA
gtgcaaataacaaagttttagagctaccgtcgttgtaccgtctacttgacttttttttcagccaactccaattttttttgtcaagtagacggtacaacgacgg

SEQ ID NO: 657 - DNA, 104 bp, synthetic construct
  source 1..104: mol_type = other DNA
gtaaccacacaatgagttttagagctaccttcccgacttccgtaggagcgcttttttttcagccaactccaattttttttgcgctcctacggaagtcgggaagg

SEQ ID NO: 658 - DNA, 104 bp, synthetic construct
  source 1..104: mol_type = other DNA
gactctcttgtattcgttttagagctaccttcccgacttccgtaggagcgcttttttttcagccaactccaattttttttgcgctcctacggaagtcgggaagg

SEQ ID NO: 659 - DNA, 104 bp, synthetic construct
  source 1..104: mol_type = other DNA
gaacaatggccaagcgttttagagctaccttcccgacttccgtaggagcgcttttttttcagccaactccaattttttttgcgctcctacggaagtcgggaagg

SEQ ID NO: 660 - DNA, 104 bp, synthetic construct
  source 1..104: mol_type = other DNA
gttctgtcttcaatagttttagagctaccttcccgacttccgtaggagcgcttttttttcagccaactccaattttttttgcgctcctacggaagtcgggaagg

SEQ ID NO: 661 - DNA, 104 bp, synthetic construct
  source 1..104: mol_type = other DNA
gctctagacaacctcgttttagagctaccttcccgacttccgtaggagcgcttttttttcagccaactccaattttttttgcgctcctacggaagtcgggaagg

SEQ ID NO: 662 - DNA, 103 bp, synthetic construct
  source 1..103: mol_type = other DNA
gacaagttgtttacgttttagagctaccttcccgacttccgtaggagcgcttttttttcagccaactccaattttttttgcgctcctacggaagtcgggaagg

SEQ ID NO: 663 - DNA, 104 bp, synthetic construct
  source 1..104: mol_type = other DNA
gagagagcctagaaagttttagagctaccttcccgacttccgtaggagcgcttttttttcagccaactccaattttttttgcgctcctacggaagtcgggaagg

SEQ ID NO: 664 - DNA, 103 bp, synthetic construct
  source 1..103: mol_type = other DNA
ggtcaaggagtcctgttttagagctaccttcccgacttccgtaggagcgcttttttttcagccaactccaattttttttgcgctcctacggaagtcgggaagg

SEQ ID NO: 665 - DNA, 104 bp, synthetic construct
  source 1..104: mol_type = other DNA
gttgagagcaacacggttttagagctaccttcccgacttccgtaggagcgcttttttttcagccaactccaattttttttgcgctcctacggaagtcgggaagg

SEQ ID NO: 666 - DNA, 104 bp, synthetic construct
  source 1..104: mol_type = other DNA
gtcatgaccagcaaagttttagagctaccttcccgacttccgtaggagcgcttttttttcagccaactccaattttttttgcgctcctacggaagtcgggaagg

SEQ ID NO: 667 - DNA, 104 bp, synthetic construct
  source 1..104: mol_type = other DNA
gcggtcaccgcggccgttttagagctaccttcccgacttccgtaggagcgcttttttttcagccaactccaattttttttgcgctcctacggaagtcgggaagg

SEQ ID NO: 668 - DNA, 103 bp, synthetic construct
  source 1..103: mol_type = other DNA
gtgcaaataacaaagttttagagctaccttcccgacttccgtaggagcgcttttttttcagccaactccaattttttttgcgctcctacggaagtcgggaagg

SEQ ID NO: 669 - DNA, 104 bp, synthetic construct
  source 1..104: mol_type = other DNA
gtaaccacacaatgagttttagagctacctgaaggtaaagatcgggtcctcttttttttcagccaactccaattttttttgaggacccgatctttaccttcagg

SEQ ID NO: 670 - DNA, 104 bp, synthetic construct
  source 1..104: mol_type = other DNA
gactctcttgtattcgttttagagctacctgaaggtaaagatcgggtcctcttttttttcagccaactccaattttttttgaggacccgatctttaccttcagg

SEQ ID NO: 671 - DNA, 104 bp, synthetic construct
  source 1..104: mol_type = other DNA
gaacaatggccaagcgttttagagctacctgaaggtaaagatcgggtcctcttttttttcagccaactccaattttttttgaggacccgatctttaccttcagg

SEQ ID NO: 672 - DNA, 104 bp, synthetic construct
  source 1..104: mol_type = other DNA
gttctgtcttcaatagttttagagctacctgaaggtaaagatcgggtcctcttttttttcagccaactccaattttttttgaggacccgatctttaccttcagg

SEQ ID NO: 673 - DNA, 104 bp, synthetic construct
  source 1..104: mol_type = other DNA
gctctagacaacctcgttttagagctacctgaaggtaaagatcgggtcctcttttttttcagccaactccaattttttttgaggacccgatctttaccttcagg

SEQ ID NO: 674 - DNA, 103 bp, synthetic construct
  source 1..103: mol_type = other DNA
gacaagttgtttacgttttagagctacctgaaggtaaagatcgggtcctcttttttttcagccaactccaattttttttgaggacccgatctttaccttcagg

SEQ ID NO: 675 - DNA, 104 bp, synthetic construct
  source 1..104: mol_type = other DNA
gagagagcctagaaagttttagagctacctgaaggtaaagatcgggtcctcttttttttcagccaactccaattttttttgaggacccgatctttaccttcagg

SEQ ID NO: 676 - DNA, 103 bp, synthetic construct
  source 1..103: mol_type = other DNA
ggtcaaggagtcctgttttagagctacctgaaggtaaagatcgggtcctcttttttttcagccaactccaattttttttgaggacccgatctttaccttcagg

SEQ ID NO: 677 - DNA, 104 bp, synthetic construct
  source 1..104: mol_type = other DNA
gttgagagcaacacggttttagagctacctgaaggtaaagatcgggtcctcttttttttcagccaactccaattttttttgaggacccgatctttaccttcagg

SEQ ID NO: 678 - DNA, 104 bp, synthetic construct
  source 1..104: mol_type = other DNA
gtcatgaccagcaaagttttagagctacctgaaggtaaagatcgggtcctcttttttttcagccaactccaattttttttgaggacccgatctttaccttcagg

SEQ ID NO: 679 - DNA, 104 bp, synthetic construct
  source 1..104: mol_type = other DNA
gcggtcaccgcggccgttttagagctacctgaaggtaaagatcgggtcctcttttttttcagccaactccaattttttttgaggacccgatctttaccttcagg

SEQ ID NO: 680 - DNA, 103 bp, synthetic construct
  source 1..103: mol_type = other DNA
gtgcaaataacaaagttttagagctacctgaaggtaaagatcgggtcctcttttttttcagccaactccaattttttttgaggacccgatctttaccttcagg

SEQ ID NO: 681 - DNA, 102 bp, synthetic construct
  source 1..102: mol_type = other DNA
gtaaccacacaatgagttttagagctacctggttatagcggacgcactgtttttttttcagccaactccaattttttttacagtgcgtccgctataaccagg

SEQ ID NO: 682 - DNA, 102 bp, synthetic construct
  source 1..102: mol_type = other DNA
gactctcttgtattcgttttagagctacctggttatagcggacgcactgtttttttttcagccaactccaattttttttacagtgcgtccgctataaccagg

SEQ ID NO: 683 - DNA, 102 bp, synthetic construct
  source 1..102: mol_type = other DNA
gaacaatggccaagcgttttagagctacctggttatagcggacgcactgtttttttttcagccaactccaattttttttacagtgcgtccgctataaccagg

SEQ ID NO: 684 - DNA, 102 bp, synthetic construct
  source 1..102: mol_type = other DNA
gttctgtcttcaatagttttagagctacctggttatagcggacgcactgtttttttttcagccaactccaattttttttacagtgcgtccgctataaccagg

SEQ ID NO: 685 - DNA, 102 bp, synthetic construct
  source 1..102: mol_type = other DNA
gctctagacaacctcgttttagagctacctggttatagcggacgcactgtttttttttcagccaactccaattttttttacagtgcgtccgctataaccagg

SEQ ID NO: 686 - DNA, 101 bp, synthetic construct
  source 1..101: mol_type = other DNA
gacaagttgtttacgttttagagctacctggttatagcggacgcactgtttttttttcagccaactccaattttttttacagtgcgtccgctataaccagg

SEQ ID NO: 687 - DNA, 102 bp, synthetic construct
  source 1..102: mol_type = other DNA
gagagagcctagaaagttttagagctacctggttatagcggacgcactgtttttttttcagccaactccaattttttttacagtgcgtccgctataaccagg

SEQ ID NO: 688 - DNA, 101 bp, synthetic construct
  source 1..101: mol_type = other DNA
ggtcaaggagtcctgttttagagctacctggttatagcggacgcactgtttttttttcagccaactccaattttttttacagtgcgtccgctataaccagg

SEQ ID NO: 689 - DNA, 102 bp, synthetic construct
  source 1..102: mol_type = other DNA
gttgagagcaacacggttttagagctacctggttatagcggacgcactgtttttttttcagccaactccaattttttttacagtgcgtccgctataaccagg

SEQ ID NO: 690 - DNA, 102 bp, synthetic construct
  source 1..102: mol_type = other DNA
gtcatgaccagcaaagttttagagctacctggttatagcggacgcactgtttttttttcagccaactccaattttttttacagtgcgtccgctataaccagg

SEQ ID NO: 691 - DNA, 102 bp, synthetic construct
  source 1..102: mol_type = other DNA
gcggtcaccgcggccgttttagagctacctggttatagcggacgcactgtttttttttcagccaactccaattttttttacagtgcgtccgctataaccagg

SEQ ID NO: 692 - DNA, 101 bp, synthetic construct
  source 1..101: mol_type = other DNA
gtgcaaataacaaagttttagagctacctggttatagcggacgcactgtttttttttcagccaactccaattttttttacagtgcgtccgctataaccagg

SEQ ID NO: 693 - DNA, 102 bp, synthetic construct
  source 1..102: mol_type = other DNA
gtaaccacacaatgagttttagagctaccgcatcgtattatctgcgaagcttttttttcagccaactccaattttttttgcttcgcagataatacgatgcgg

SEQ ID NO: 694 - DNA, 102 bp, synthetic construct
  source 1..102: mol_type = other DNA
gactctcttgtattcgttttagagctaccgcatcgtattatctgcgaagcttttttttcagccaactccaattttttttgcttcgcagataatacgatgcgg

SEQ ID NO: 695 - DNA, 102 bp, synthetic construct
  source 1..102: mol_type = other DNA
gaacaatggccaagcgttttagagctaccgcatcgtattatctgcgaagcttttttttcagccaactccaattttttttgcttcgcagataatacgatgcgg

SEQ ID NO: 696 - DNA, 102 bp, synthetic construct
  source 1..102: mol_type = other DNA
gttctgtcttcaatagttttagagctaccgcatcgtattatctgcgaagcttttttttcagccaactccaattttttttgcttcgcagataatacgatgcgg

SEQ ID NO: 697 - DNA, 102 bp, synthetic construct
  source 1..102: mol_type = other DNA
gctctagacaacctcgttttagagctaccgcatcgtattatctgcgaagcttttttttcagccaactccaattttttttgcttcgcagataatacgatgcgg

SEQ ID NO: 698 - DNA, 101 bp, synthetic construct
  source 1..101: mol_type = other DNA
gacaagttgtttacgttttagagctaccgcatcgtattatctgcgaagcttttttttcagccaactccaattttttttgcttcgcagataatacgatgcgg

SEQ ID NO: 699 - DNA, 102 bp, synthetic construct
  source 1..102: mol_type = other DNA
gagagagcctagaaagttttagagctaccgcatcgtattatctgcgaagcttttttttcagccaactccaattttttttgcttcgcagataatacgatgcgg

SEQ ID NO: 700 - DNA, 101 bp, synthetic construct
  source 1..101: mol_type = other DNA
ggtcaaggagtcctgttttagagctaccgcatcgtattatctgcgaagcttttttttcagccaactccaattttttttgcttcgcagataatacgatgcgg

SEQ ID NO: 701 - DNA, 102 bp, synthetic construct
  source 1..102: mol_type = other DNA
gttgagagcaacacggttttagagctaccgcatcgtattatctgcgaagcttttttttcagccaactccaattttttttgcttcgcagataatacgatgcgg

SEQ ID NO: 702 - DNA, 102 bp, synthetic construct
  source 1..102: mol_type = other DNA
gtcatgaccagcaaagttttagagctaccgcatcgtattatctgcgaagcttttttttcagccaactccaattttttttgcttcgcagataatacgatgcgg

SEQ ID NO: 703 - DNA, 102 bp, synthetic construct
  source 1..102: mol_type = other DNA
gcggtcaccgcggccgttttagagctaccgcatcgtattatctgcgaagcttttttttcagccaactccaattttttttgcttcgcagataatacgatgcgg

SEQ ID NO: 704 - DNA, 101 bp, synthetic construct
  source 1..101: mol_type = other DNA
gtgcaaataacaaagttttagagctaccgcatcgtattatctgcgaagcttttttttcagccaactccaattttttttgcttcgcagataatacgatgcgg

SEQ ID NO: 705 - DNA, 102 bp, synthetic construct
  source 1..102: mol_type = other DNA
gtaaccacacaatgagttttagagctaccgctaggacgttcaacggagtcttttttttcagccaactccaattttttttgactccgttgaacgtcctagcgg

SEQ ID NO: 706 - DNA, 102 bp, synthetic construct
  source 1..102: mol_type = other DNA
gactctcttgtattcgttttagagctaccgctaggacgttcaacggagtcttttttttcagccaactccaattttttttgactccgttgaacgtcctagcgg

SEQ ID NO: 707 - DNA, 102 bp, synthetic construct
  source 1..102: mol_type = other DNA
gaacaatggccaagcgttttagagctaccgctaggacgttcaacggagtcttttttttcagccaactccaattttttttgactccgttgaacgtcctagcgg

SEQ ID NO: 708 - DNA, 102 bp, synthetic construct
  source 1..102: mol_type = other DNA
gttctgtcttcaatagttttagagctaccgctaggacgttcaacggagtcttttttttcagccaactccaattttttttgactccgttgaacgtcctagcgg

SEQ ID NO: 709 - DNA, 102 bp, synthetic construct
  source 1..102: mol_type = other DNA
gctctagacaacctcgttttagagctaccgctaggacgttcaacggagtcttttttttcagccaactccaattttttttgactccgttgaacgtcctagcgg

SEQ ID NO: 710 - DNA, 101 bp, synthetic construct
  source 1..101: mol_type = other DNA
gacaagttgtttacgttttagagctaccgctaggacgttcaacggagtcttttttttcagccaactccaattttttttgactccgttgaacgtcctagcgg

SEQ ID NO: 711 - DNA, 102 bp, synthetic construct
  source 1..102: mol_type = other DNA
gagagagcctagaaagttttagagctaccgctaggacgttcaacggagtcttttttttcagccaactccaattttttttgactccgttgaacgtcctagcgg

SEQ ID NO: 712 - DNA, 101 bp, synthetic construct
  source 1..101: mol_type = other DNA
ggtcaaggagtcctgttttagagctaccgctaggacgttcaacggagtcttttttttcagccaactccaattttttttgactccgttgaacgtcctagcgg

SEQ ID NO: 713 - DNA, 102 bp, synthetic construct
  source 1..102: mol_type = other DNA
gttgagagcaacacggttttagagctaccgctaggacgttcaacggagtcttttttttcagccaactccaattttttttgactccgttgaacgtcctagcgg

SEQ ID NO: 714 - DNA, 102 bp, synthetic construct
  source 1..102: mol_type = other DNA
gtcatgaccagcaaagttttagagctaccgctaggacgttcaacggagtcttttttttcagccaactccaattttttttgactccgttgaacgtcctagcgg

SEQ ID NO: 715 - DNA, 102 bp, synthetic construct
  source 1..102: mol_type = other DNA
gcggtcaccgcggccgttttagagctaccgctaggacgttcaacggagtcttttttttcagccaactccaattttttttgactccgttgaacgtcctagcgg

SEQ ID NO: 716 - DNA, 101 bp, synthetic construct
  source 1..101: mol_type = other DNA
gtgcaaataacaaagttttagagctaccgctaggacgttcaacggagtcttttttttcagccaactccaattttttttgactccgttgaacgtcctagcgg

SEQ ID NO: 717 - DNA, 102 bp, synthetic construct
  source 1..102: mol_type = other DNA
gtaaccacacaatgagttttagagctaccatagcggtactatcggcatctttttttttcagccaactccaattttttttagatgccgatagtaccgctatgg

SEQ ID NO: 718 - DNA, 102 bp, synthetic construct
  source 1..102: mol_type = other DNA
gactctcttgtattcgttttagagctaccatagcggtactatcggcatctttttttttcagccaactccaattttttttagatgccgatagtaccgctatgg

SEQ ID NO: 719 - DNA, 102 bp, synthetic construct
  source 1..102: mol_type = other DNA
gaacaatggccaagcgttttagagctaccatagcggtactatcggcatctttttttttcagccaactccaattttttttagatgccgatagtaccgctatgg

SEQ ID NO: 720 - DNA, 102 bp, synthetic construct
  source 1..102: mol_type = other DNA
gttctgtcttcaatagttttagagctaccatagcggtactatcggcatctttttttttcagccaactccaattttttttagatgccgatagtaccgctatgg

SEQ ID NO: 721 - DNA, 102 bp, synthetic construct
  source 1..102: mol_type = other DNA
gctctagacaacctcgttttagagctaccatagcggtactatcggcatctttttttttcagccaactccaattttttttagatgccgatagtaccgctatgg

SEQ ID NO: 722 - DNA, 101 bp, synthetic construct
  source 1..101: mol_type = other DNA
gacaagttgtttacgttttagagctaccatagcggtactatcggcatctttttttttcagccaactccaattttttttagatgccgatagtaccgctatgg

SEQ ID NO: 723 - DNA, 102 bp, synthetic construct
  source 1..102: mol_type = other DNA
gagagagcctagaaagttttagagctaccatagcggtactatcggcatctttttttttcagccaactccaattttttttagatgccgatagtaccgctatgg

SEQ ID NO: 724 - DNA, 101 bp, synthetic construct
  source 1..101: mol_type = other DNA
ggtcaaggagtcctgttttagagctaccatagcggtactatcggcatctttttttttcagccaactccaattttttttagatgccgatagtaccgctatgg

SEQ ID NO: 725 - DNA, 102 bp, synthetic construct
  source 1..102: mol_type = other DNA
gttgagagcaacacggttttagagctaccatagcggtactatcggcatctttttttttcagccaactccaattttttttagatgccgatagtaccgctatgg

SEQ ID NO: 726 - DNA, 102 bp, synthetic construct
  source 1..102: mol_type = other DNA
gtcatgaccagcaaagttttagagctaccatagcggtactatcggcatctttttttttcagccaactccaattttttttagatgccgatagtaccgctatgg

SEQ ID NO: 727 - DNA, 102 bp, synthetic construct
  source 1..102: mol_type = other DNA
gcggtcaccgcggccgttttagagctaccatagcggtactatcggcatctttttttttcagccaactccaattttttttagatgccgatagtaccgctatgg

SEQ ID NO: 728 - DNA, 101 bp, synthetic construct
  source 1..101: mol_type = other DNA
gtgcaaataacaaagttttagagctaccatagcggtactatcggcatctttttttttcagccaactccaattttttttagatgccgatagtaccgctatgg

SEQ ID NO: 729 - DNA, 102 bp, synthetic construct
  source 1..102: mol_type = other DNA
gtaaccacacaatgagttttagagctacctcgtactagtctcgcatgaccttttttttcagccaactccaattttttttggtcatgcgagactagtacgagg

SEQ ID NO: 730 - DNA, 102 bp, synthetic construct
  source 1..102: mol_type = other DNA
gactctcttgtattcgttttagagctacctcgtactagtctcgcatgaccttttttttcagccaactccaattttttttggtcatgcgagactagtacgagg

SEQ ID NO: 731 - DNA, 102 bp, synthetic construct
  source 1..102: mol_type = other DNA
gaacaatggccaagcgttttagagctacctcgtactagtctcgcatgaccttttttttcagccaactccaattttttttggtcatgcgagactagtacgagg

SEQ ID NO: 732 - DNA, 102 bp, synthetic construct
  source 1..102: mol_type = other DNA
gttctgtcttcaatagttttagagctacctcgtactagtctcgcatgaccttttttttcagccaactccaattttttttggtcatgcgagactagtacgagg

SEQ ID NO: 733 - DNA, 102 bp, synthetic construct
  source 1..102: mol_type = other DNA
gctctagacaacctcgttttagagctacctcgtactagtctcgcatgaccttttttttcagccaactccaattttttttggtcatgcgagactagtacgagg

SEQ ID NO: 734 - DNA, 101 bp, synthetic construct
  source 1..101: mol_type = other DNA
gacaagttgtttacgttttagagctacctcgtactagtctcgcatgaccttttttttcagccaactccaattttttttggtcatgcgagactagtacgagg

SEQ ID NO: 735 - DNA, 102 bp, synthetic construct
  source 1..102: mol_type = other DNA
gagagagcctagaaagttttagagctacctcgtactagtctcgcatgaccttttttttcagccaactccaattttttttggtcatgcgagactagtacgagg

SEQ ID NO: 736 - DNA, 101 bp, synthetic construct
  source 1..101: mol_type = other DNA
ggtcaaggagtcctgttttagagctacctcgtactagtctcgcatgaccttttttttcagccaactccaattttttttggtcatgcgagactagtacgagg

SEQ ID NO: 737 - DNA, 102 bp, synthetic construct
  source 1..102: mol_type = other DNA
gttgagagcaacacggttttagagctacctcgtactagtctcgcatgaccttttttttcagccaactccaattttttttggtcatgcgagactagtacgagg

SEQ ID NO: 738 - DNA, 102 bp, synthetic construct
  source 1..102: mol_type = other DNA
gtcatgaccagcaaagttttagagctacctcgtactagtctcgcatgaccttttttttcagccaactccaattttttttggtcatgcgagactagtacgagg

SEQ ID NO: 739 - DNA, 102 bp, synthetic construct
  source 1..102: mol_type = other DNA
gcggtcaccgcggccgttttagagctacctcgtactagtctcgcatgaccttttttttcagccaactccaattttttttggtcatgcgagactagtacgagg

SEQ ID NO: 740 - DNA, 101 bp, synthetic construct
  source 1..101: mol_type = other DNA
gtgcaaataacaaagttttagagctacctcgtactagtctcgcatgaccttttttttcagccaactccaattttttttggtcatgcgagactagtacgagg

SEQ ID NO: 741 - DNA, 102 bp, synthetic construct
  source 1..102: mol_type = other DNA
gtaaccacacaatgagttttagagctaccgatagtgctaaacgacgctttttttttttcagccaactccaattttttttaaagcgtcgtttagcactatcgg

SEQ ID NO: 742 - DNA, 102 bp, synthetic construct
  source 1..102: mol_type = other DNA
gactctcttgtattcgttttagagctaccgatagtgctaaacgacgctttttttttttcagccaactccaattttttttaaagcgtcgtttagcactatcgg

SEQ ID NO: 743 - DNA, 102 bp, synthetic construct
  source 1..102: mol_type = other DNA
gaacaatggccaagcgttttagagctaccgatagtgctaaacgacgctttttttttttcagccaactccaattttttttaaagcgtcgtttagcactatcgg

SEQ ID NO: 744 - DNA, 102 bp, synthetic construct
  source 1..102: mol_type = other DNA
gttctgtcttcaatagttttagagctaccgatagtgctaaacgacgctttttttttttcagccaactccaattttttttaaagcgtcgtttagcactatcgg

SEQ ID NO: 745 - DNA, 102 bp, synthetic construct
  source 1..102: mol_type = other DNA
gctctagacaacctcgttttagagctaccgatagtgctaaacgacgctttttttttttcagccaactccaattttttttaaagcgtcgtttagcactatcgg

SEQ ID NO: 746 - DNA, 101 bp, synthetic construct
  source 1..101: mol_type = other DNA
gacaagttgtttacgttttagagctaccgatagtgctaaacgacgctttttttttttcagccaactccaattttttttaaagcgtcgtttagcactatcgg

SEQ ID NO: 747 - DNA, 102 bp, synthetic construct
  source 1..102: mol_type = other DNA
gagagagcctagaaagttttagagctaccgatagtgctaaacgacgctttttttttttcagccaactccaattttttttaaagcgtcgtttagcactatcgg

SEQ ID NO: 748 - DNA, 101 bp, synthetic construct
  source 1..101: mol_type = other DNA
ggtcaaggagtcctgttttagagctaccgatagtgctaaacgacgctttttttttttcagccaactccaattttttttaaagcgtcgtttagcactatcgg

SEQ ID NO: 749 - DNA, 102 bp, synthetic construct
  source 1..102: mol_type = other DNA
gttgagagcaacacggttttagagctaccgatagtgctaaacgacgctttttttttttcagccaactccaattttttttaaagcgtcgtttagcactatcgg

SEQ ID NO: 750 - DNA, 102 bp, synthetic construct
  source 1..102: mol_type = other DNA
gtcatgaccagcaaagttttagagctaccgatagtgctaaacgacgctttttttttttcagccaactccaattttttttaaagcgtcgtttagcactatcgg

SEQ ID NO: 751 - DNA, 102 bp, synthetic construct
  source 1..102: mol_type = other DNA
gcggtcaccgcggccgttttagagctaccgatagtgctaaacgacgctttttttttttcagccaactccaattttttttaaagcgtcgtttagcactatcgg

SEQ ID NO: 752 - DNA, 101 bp, synthetic construct
  source 1..101: mol_type = other DNA
gtgcaaataacaaagttttagagctaccgatagtgctaaacgacgctttttttttttcagccaactccaattttttttaaagcgtcgtttagcactatcgg

SEQ ID NO: 753 - DNA, 102 bp, synthetic construct
  source 1..102: mol_type = other DNA
gtaaccacacaatgagttttagagctacccgttatcgacgttcaaggaacttttttttcagccaactccaattttttttgttccttgaacgtcgataacggg

SEQ ID NO: 754 - DNA, 102 bp, synthetic construct
  source 1..102: mol_type = other DNA
gactctcttgtattcgttttagagctacccgttatcgacgttcaaggaacttttttttcagccaactccaattttttttgttccttgaacgtcgataacggg

SEQ ID NO: 755 - DNA, 102 bp, synthetic construct
  source 1..102: mol_type = other DNA
gaacaatggccaagcgttttagagctacccgttatcgacgttcaaggaacttttttttcagccaactccaattttttttgttccttgaacgtcgataacggg

SEQ ID NO: 756 - DNA, 102 bp, synthetic construct
  source 1..102: mol_type = other DNA
gttctgtcttcaatagttttagagctacccgttatcgacgttcaaggaacttttttttcagccaactccaattttttttgttccttgaacgtcgataacggg

SEQ ID NO: 757 - DNA, 102 bp, synthetic construct
  source 1..102: mol_type = other DNA
gctctagacaacctcgttttagagctacccgttatcgacgttcaaggaacttttttttcagccaactccaattttttttgttccttgaacgtcgataacggg

SEQ ID NO: 758 - DNA, 101 bp, synthetic construct
  source 1..101: mol_type = other DNA
gacaagttgtttacgttttagagctacccgttatcgacgttcaaggaacttttttttcagccaactccaattttttttgttccttgaacgtcgataacggg

SEQ ID NO: 759 - DNA, 102 bp, synthetic construct
  source 1..102: mol_type = other DNA
gagagagcctagaaagttttagagctacccgttatcgacgttcaaggaacttttttttcagccaactccaattttttttgttccttgaacgtcgataacggg

SEQ ID NO: 760 - DNA, 101 bp, synthetic construct
  source 1..101: mol_type = other DNA
ggtcaaggagtcctgttttagagctacccgttatcgacgttcaaggaacttttttttcagccaactccaattttttttgttccttgaacgtcgataacggg

SEQ ID NO: 761 - DNA, 102 bp, synthetic construct
  source 1..102: mol_type = other DNA
gttgagagcaacacggttttagagctacccgttatcgacgttcaaggaacttttttttcagccaactccaattttttttgttccttgaacgtcgataacggg

SEQ ID NO: 762 - DNA, 102 bp, synthetic construct
  source 1..102: mol_type = other DNA
gtcatgaccagcaaagttttagagctacccgttatcgacgttcaaggaacttttttttcagccaactccaattttttttgttccttgaacgtcgataacggg

SEQ ID NO: 763 - DNA, 102 bp, synthetic construct
  source 1..102: mol_type = other DNA
gcggtcaccgcggccgttttagagctacccgttatcgacgttcaaggaacttttttttcagccaactccaattttttttgttccttgaacgtcgataacggg

SEQ ID NO: 764 - DNA, 101 bp, synthetic construct
  source 1..101: mol_type = other DNA
gtgcaaataacaaagttttagagctacccgttatcgacgttcaaggaacttttttttcagccaactccaattttttttgttccttgaacgtcgataacggg

SEQ ID NO: 765 - DNA, 102 bp, synthetic construct
  source 1..102: mol_type = other DNA
gtaaccacacaatgagttttagagctaccgatcaatgcggtctgcgtaacttttttttcagccaactccaattttttttgttacgcagaccgcattgatcgg

SEQ ID NO: 766 - DNA, 102 bp, synthetic construct
  source 1..102: mol_type = other DNA
gactctcttgtattcgttttagagctaccgatcaatgcggtctgcgtaacttttttttcagccaactccaattttttttgttacgcagaccgcattgatcgg

SEQ ID NO: 767 - DNA, 102 bp, synthetic construct
  source 1..102: mol_type = other DNA
gaacaatggccaagcgttttagagctaccgatcaatgcggtctgcgtaacttttttttcagccaactccaattttttttgttacgcagaccgcattgatcgg

SEQ ID NO: 768 - DNA, 102 bp, synthetic construct
  source 1..102: mol_type = other DNA
gttctgtcttcaatagttttagagctaccgatcaatgcggtctgcgtaacttttttttcagccaactccaattttttttgttacgcagaccgcattgatcgg

SEQ ID NO: 769 - DNA, 102 bp, synthetic construct
  source 1..102: mol_type = other DNA
gctctagacaacctcgttttagagctaccgatcaatgcggtctgcgtaacttttttttcagccaactccaattttttttgttacgcagaccgcattgatcgg

SEQ ID NO: 770 - DNA, 101 bp, synthetic construct
  source 1..101: mol_type = other DNA
gacaagttgtttacgttttagagctaccgatcaatgcggtctgcgtaacttttttttcagccaactccaattttttttgttacgcagaccgcattgatcgg

SEQ ID NO: 771 - DNA, 102 bp, synthetic construct
  source 1..102: mol_type = other DNA
gagagagcctagaaagttttagagctaccgatcaatgcggtctgcgtaacttttttttcagccaactccaattttttttgttacgcagaccgcattgatcgg

SEQ ID NO: 772 - DNA, 101 bp, synthetic construct
  source 1..101: mol_type = other DNA
ggtcaaggagtcctgttttagagctaccgatcaatgcggtctgcgtaacttttttttcagccaactccaattttttttgttacgcagaccgcattgatcgg

SEQ ID NO: 773 - DNA, 102 bp, synthetic construct
  source 1..102: mol_type = other DNA
gttgagagcaacacggttttagagctaccgatcaatgcggtctgcgtaacttttttttcagccaactccaattttttttgttacgcagaccgcattgatcgg

SEQ ID NO: 774 - DNA, 102 bp, synthetic construct
  source 1..102: mol_type = other DNA
gtcatgaccagcaaagttttagagctaccgatcaatgcggtctgcgtaacttttttttcagccaactccaattttttttgttacgcagaccgcattgatcgg

SEQ ID NO: 775 - DNA, 102 bp, synthetic construct
  source 1..102: mol_type = other DNA
gcggtcaccgcggccgttttagagctaccgatcaatgcggtctgcgtaacttttttttcagccaactccaattttttttgttacgcagaccgcattgatcgg

SEQ ID NO: 776 - DNA, 101 bp, synthetic construct
  source 1..101: mol_type = other DNA
gtgcaaataacaaagttttagagctaccgatcaatgcggtctgcgtaacttttttttcagccaactccaattttttttgttacgcagaccgcattgatcgg

SEQ ID NO: 777 - DNA, 102 bp, synthetic construct
  source 1..102: mol_type = other DNA
gtaaccacacaatgagttttagagctacccttactcgcgatactctcgacttttttttcagccaactccaattttttttgtcgagagtatcgcgagtaaggg

SEQ ID NO: 778 - DNA, 102 bp, synthetic construct
  source 1..102: mol_type = other DNA
gactctcttgtattcgttttagagctacccttactcgcgatactctcgacttttttttcagccaactccaattttttttgtcgagagtatcgcgagtaaggg

SEQ ID NO: 779 - DNA, 102 bp, synthetic construct
  source 1..102: mol_type = other DNA
gaacaatggccaagcgttttagagctacccttactcgcgatactctcgacttttttttcagccaactccaattttttttgtcgagagtatcgcgagtaaggg

SEQ ID NO: 780 - DNA, 102 bp, synthetic construct
  source 1..102: mol_type = other DNA
gttctgtcttcaatagttttagagctacccttactcgcgatactctcgacttttttttcagccaactccaattttttttgtcgagagtatcgcgagtaaggg

SEQ ID NO: 781 - DNA, 102 bp, synthetic construct
  source 1..102: mol_type = other DNA
gctctagacaacctcgttttagagctacccttactcgcgatactctcgacttttttttcagccaactccaattttttttgtcgagagtatcgcgagtaaggg

SEQ ID NO: 782 - DNA, 101 bp, synthetic construct
  source 1..101: mol_type = other DNA
gacaagttgtttacgttttagagctacccttactcgcgatactctcgacttttttttcagccaactccaattttttttgtcgagagtatcgcgagtaaggg

SEQ ID NO: 783 - DNA, 102 bp, synthetic construct
  source 1..102: mol_type = other DNA
gagagagcctagaaagttttagagctacccttactcgcgatactctcgacttttttttcagccaactccaattttttttgtcgagagtatcgcgagtaaggg

SEQ ID NO: 784 - DNA, 101 bp, synthetic construct
  source 1..101: mol_type = other DNA
ggtcaaggagtcctgttttagagctacccttactcgcgatactctcgacttttttttcagccaactccaattttttttgtcgagagtatcgcgagtaaggg

SEQ ID NO: 785 - DNA, 102 bp, synthetic construct
  source 1..102: mol_type = other DNA
gttgagagcaacacggttttagagctacccttactcgcgatactctcgacttttttttcagccaactccaattttttttgtcgagagtatcgcgagtaaggg

SEQ ID NO: 786 - DNA, 102 bp, synthetic construct
  source 1..102: mol_type = other DNA
gtcatgaccagcaaagttttagagctacccttactcgcgatactctcgacttttttttcagccaactccaattttttttgtcgagagtatcgcgagtaaggg

SEQ ID NO: 787 - DNA, 102 bp, synthetic construct
  source 1..102: mol_type = other DNA
gcggtcaccgcggccgttttagagctacccttactcgcgatactctcgacttttttttcagccaactccaattttttttgtcgagagtatcgcgagtaaggg

SEQ ID NO: 788 - DNA, 101 bp, synthetic construct
  source 1..101: mol_type = other DNA
gtgcaaataacaaagttttagagctacccttactcgcgatactctcgacttttttttcagccaactccaattttttttgtcgagagtatcgcgagtaaggg

SEQ ID NO: 789 - DNA, 102 bp, synthetic construct
  source 1..102: mol_type = other DNA
gtaaccacacaatgagttttagagctaccgcggacggtaagcacggaatattttttttcagccaactccaatttttttttattccgtgcttaccgtccgcgg

SEQ ID NO: 790 - DNA, 102 bp, synthetic construct
  source 1..102: mol_type = other DNA
gactctcttgtattcgttttagagctaccgcggacggtaagcacggaatattttttttcagccaactccaatttttttttattccgtgcttaccgtccgcgg

SEQ ID NO: 791 - DNA, 102 bp, synthetic construct
  source 1..102: mol_type = other DNA
gaacaatggccaagcgttttagagctaccgcggacggtaagcacggaatattttttttcagccaactccaatttttttttattccgtgcttaccgtccgcgg

SEQ ID NO: 792 - DNA, 102 bp, synthetic construct
  source 1..102: mol_type = other DNA
gttctgtcttcaatagttttagagctaccgcggacggtaagcacggaatattttttttcagccaactccaatttttttttattccgtgcttaccgtccgcgg

SEQ ID NO: 793 - DNA, 102 bp, synthetic construct
  source 1..102: mol_type = other DNA
gctctagacaacctcgttttagagctaccgcggacggtaagcacggaatattttttttcagccaactccaatttttttttattccgtgcttaccgtccgcgg

SEQ ID NO: 794 - DNA, 101 bp, synthetic construct
  source 1..101: mol_type = other DNA
gacaagttgtttacgttttagagctaccgcggacggtaagcacggaatattttttttcagccaactccaatttttttttattccgtgcttaccgtccgcgg

SEQ ID NO: 795 - DNA, 102 bp, synthetic construct
  source 1..102: mol_type = other DNA
gagagagcctagaaagttttagagctaccgcggacggtaagcacggaatattttttttcagccaactccaatttttttttattccgtgcttaccgtccgcgg

SEQ ID NO: 796 - DNA, 101 bp, synthetic construct
  source 1..101: mol_type = other DNA
ggtcaaggagtcctgttttagagctaccgcggacggtaagcacggaatattttttttcagccaactccaatttttttttattccgtgcttaccgtccgcgg

SEQ ID NO: 797 - DNA, 102 bp, synthetic construct
  source 1..102: mol_type = other DNA
gttgagagcaacacggttttagagctaccgcggacggtaagcacggaatattttttttcagccaactccaatttttttttattccgtgcttaccgtccgcgg

SEQ ID NO: 798 - DNA, 102 bp, synthetic construct
  source 1..102: mol_type = other DNA
gtcatgaccagcaaagttttagagctaccgcggacggtaagcacggaatattttttttcagccaactccaatttttttttattccgtgcttaccgtccgcgg

SEQ ID NO: 799 - DNA, 102 bp, synthetic construct
  source 1..102: mol_type = other DNA
gcggtcaccgcggccgttttagagctaccgcggacggtaagcacggaatattttttttcagccaactccaatttttttttattccgtgcttaccgtccgcgg

SEQ ID NO: 800 - DNA, 101 bp, synthetic construct
  source 1..101: mol_type = other DNA
gtgcaaataacaaagttttagagctaccgcggacggtaagcacggaatattttttttcagccaactccaatttttttttattccgtgcttaccgtccgcgg

SEQ ID NO: 801 - DNA, 102 bp, synthetic construct
  source 1..102: mol_type = other DNA
gtaaccacacaatgagttttagagctacctatagtcacgaatcgtagggtttttttttcagccaactccaattttttttaccctacgattcgtgactatagg

SEQ ID NO: 802 - DNA, 102 bp, synthetic construct
  source 1..102: mol_type = other DNA
gactctcttgtattcgttttagagctacctatagtcacgaatcgtagggtttttttttcagccaactccaattttttttaccctacgattcgtgactatagg

SEQ ID NO: 803 - DNA, 102 bp, synthetic construct
  source 1..102: mol_type = other DNA
gaacaatggccaagcgttttagagctacctatagtcacgaatcgtagggtttttttttcagccaactccaattttttttaccctacgattcgtgactatagg

SEQ ID NO: 804 - DNA, 102 bp, synthetic construct
  source 1..102: mol_type = other DNA
gttctgtcttcaatagttttagagctacctatagtcacgaatcgtagggtttttttttcagccaactccaattttttttaccctacgattcgtgactatagg

SEQ ID NO: 805 - DNA, 102 bp, synthetic construct
  source 1..102: mol_type = other DNA
gctctagacaacctcgttttagagctacctatagtcacgaatcgtagggtttttttttcagccaactccaattttttttaccctacgattcgtgactatagg

SEQ ID NO: 806 - DNA, 101 bp, synthetic construct
  source 1..101: mol_type = other DNA
gacaagttgtttacgttttagagctacctatagtcacgaatcgtagggtttttttttcagccaactccaattttttttaccctacgattcgtgactatagg

SEQ ID NO: 807 - DNA, 102 bp, synthetic construct
  source 1..102: mol_type = other DNA
gagagagcctagaaagttttagagctacctatagtcacgaatcgtagggtttttttttcagccaactccaattttttttaccctacgattcgtgactatagg

SEQ ID NO: 808 - DNA, 101 bp, synthetic construct
  source 1..101: mol_type = other DNA
ggtcaaggagtcctgttttagagctacctatagtcacgaatcgtagggtttttttttcagccaactccaattttttttaccctacgattcgtgactatagg

SEQ ID NO: 809 - DNA, 102 bp, synthetic construct
  source 1..102: mol_type = other DNA
gttgagagcaacacggttttagagctacctatagtcacgaatcgtagggtttttttttcagccaactccaattttttttaccctacgattcgtgactatagg

SEQ ID NO: 810 - DNA, 102 bp, synthetic construct
  source 1..102: mol_type = other DNA
gtcatgaccagcaaagttttagagctacctatagtcacgaatcgtagggtttttttttcagccaactccaattttttttaccctacgattcgtgactatagg

SEQ ID NO: 811 - DNA, 102 bp, synthetic construct
  source 1..102: mol_type = other DNA
gcggtcaccgcggccgttttagagctacctatagtcacgaatcgtagggtttttttttcagccaactccaattttttttaccctacgattcgtgactatagg

SEQ ID NO: 812 - DNA, 101 bp, synthetic construct
  source 1..101: mol_type = other DNA
gtgcaaataacaaagttttagagctacctatagtcacgaatcgtagggtttttttttcagccaactccaattttttttaccctacgattcgtgactatagg

SEQ ID NO: 813 - DNA, 102 bp, synthetic construct
  source 1..102: mol_type = other DNA
gtaaccacacaatgagttttagagctacccgtcgtcacgtatgcgtagcattttttttcagccaactccaatttttttttgctacgcatacgtgacgacggg

SEQ ID NO: 814 - DNA, 102 bp, synthetic construct
  source 1..102: mol_type = other DNA
gactctcttgtattcgttttagagctacccgtcgtcacgtatgcgtagcattttttttcagccaactccaatttttttttgctacgcatacgtgacgacggg

SEQ ID NO: 815 - DNA, 102 bp, synthetic construct
  source 1..102: mol_type = other DNA
gaacaatggccaagcgttttagagctacccgtcgtcacgtatgcgtagcattttttttcagccaactccaatttttttttgctacgcatacgtgacgacggg

SEQ ID NO: 816 - DNA, 102 bp, synthetic construct
  source 1..102: mol_type = other DNA
gttctgtcttcaatagttttagagctacccgtcgtcacgtatgcgtagcattttttttcagccaactccaatttttttttgctacgcatacgtgacgacggg

SEQ ID NO: 817 - DNA, 102 bp, synthetic construct
  source 1..102: mol_type = other DNA
gctctagacaacctcgttttagagctacccgtcgtcacgtatgcgtagcattttttttcagccaactccaatttttttttgctacgcatacgtgacgacggg

SEQ ID NO: 818 - DNA, 101 bp, synthetic construct
  source 1..101: mol_type = other DNA
gacaagttgtttacgttttagagctacccgtcgtcacgtatgcgtagcattttttttcagccaactccaatttttttttgctacgcatacgtgacgacggg

SEQ ID NO: 819 - DNA, 102 bp, synthetic construct
  source 1..102: mol_type = other DNA
gagagagcctagaaagttttagagctacccgtcgtcacgtatgcgtagcattttttttcagccaactccaatttttttttgctacgcatacgtgacgacggg

SEQ ID NO: 820 - DNA, 101 bp, synthetic construct
  source 1..101: mol_type = other DNA
ggtcaaggagtcctgttttagagctacccgtcgtcacgtatgcgtagcattttttttcagccaactccaatttttttttgctacgcatacgtgacgacggg

SEQ ID NO: 821 - DNA, 102 bp, synthetic construct
  source 1..102: mol_type = other DNA
gttgagagcaacacggttttagagctacccgtcgtcacgtatgcgtagcattttttttcagccaactccaatttttttttgctacgcatacgtgacgacggg

SEQ ID NO: 822 - DNA, 102 bp, synthetic construct
  source 1..102: mol_type = other DNA
gtcatgaccagcaaagttttagagctacccgtcgtcacgtatgcgtagcattttttttcagccaactccaatttttttttgctacgcatacgtgacgacggg

SEQ ID NO: 823 - DNA, 102 bp, synthetic construct
  source 1..102: mol_type = other DNA
gcggtcaccgcggccgttttagagctacccgtcgtcacgtatgcgtagcattttttttcagccaactccaatttttttttgctacgcatacgtgacgacggg

SEQ ID NO: 824 - DNA, 101 bp, synthetic construct
  source 1..101: mol_type = other DNA
gtgcaaataacaaagttttagagctacccgtcgtcacgtatgcgtagcattttttttcagccaactccaatttttttttgctacgcatacgtgacgacggg

SEQ ID NO: 825 - DNA, 102 bp, synthetic construct
  source 1..102: mol_type = other DNA
gtaaccacacaatgagttttagagctacccgagaggtagtagacgacgcattttttttcagccaactccaatttttttttgcgtcgtctactacctctcggg

SEQ ID NO: 826 - DNA, 102 bp, synthetic construct
  source 1..102: mol_type = other DNA
gactctcttgtattcgttttagagctacccgagaggtagtagacgacgcattttttttcagccaactccaatttttttttgcgtcgtctactacctctcggg

SEQ ID NO: 827 - DNA, 102 bp, synthetic construct
  source 1..102: mol_type = other DNA
gaacaatggccaagcgttttagagctacccgagaggtagtagacgacgcattttttttcagccaactccaatttttttttgcgtcgtctactacctctcggg

SEQ ID NO: 828 - DNA, 102 bp, synthetic construct
  source 1..102: mol_type = other DNA
gttctgtcttcaatagttttagagctacccgagaggtagtagacgacgcattttttttcagccaactccaatttttttttgcgtcgtctactacctctcggg

SEQ ID NO: 829 - DNA, 102 bp, synthetic construct
  source 1..102: mol_type = other DNA
gctctagacaacctcgttttagagctacccgagaggtagtagacgacgcattttttttcagccaactccaatttttttttgcgtcgtctactacctctcggg

SEQ ID NO: 830 - DNA, 101 bp, synthetic construct
  source 1..101: mol_type = other DNA
gacaagttgtttacgttttagagctacccgagaggtagtagacgacgcattttttttcagccaactccaatttttttttgcgtcgtctactacctctcggg

SEQ ID NO: 831 - DNA, 102 bp, synthetic construct
  source 1..102: mol_type = other DNA
gagagagcctagaaagttttagagctacccgagaggtagtagacgacgcattttttttcagccaactccaatttttttttgcgtcgtctactacctctcggg

SEQ ID NO: 832 - DNA, 101 bp, synthetic construct
  source 1..101: mol_type = other DNA
ggtcaaggagtcctgttttagagctacccgagaggtagtagacgacgcattttttttcagccaactccaatttttttttgcgtcgtctactacctctcggg

SEQ ID NO: 833 - DNA, 102 bp, synthetic construct
  source 1..102: mol_type = other DNA
gttgagagcaacacggttttagagctacccgagaggtagtagacgacgcattttttttcagccaactccaatttttttttgcgtcgtctactacctctcggg

SEQ ID NO: 834 - DNA, 102 bp, synthetic construct
  source 1..102: mol_type = other DNA
gtcatgaccagcaaagttttagagctacccgagaggtagtagacgacgcattttttttcagccaactccaatttttttttgcgtcgtctactacctctcggg

SEQ ID NO: 835 - DNA, 102 bp, synthetic construct
  source 1..102: mol_type = other DNA
gcggtcaccgcggccgttttagagctacccgagaggtagtagacgacgcattttttttcagccaactccaatttttttttgcgtcgtctactacctctcggg

SEQ ID NO: 836 - DNA, 101 bp, synthetic construct
  source 1..101: mol_type = other DNA
gtgcaaataacaaagttttagagctacccgagaggtagtagacgacgcattttttttcagccaactccaatttttttttgcgtcgtctactacctctcggg

SEQ ID NO: 837 - DNA, 102 bp, synthetic construct
  source 1..102: mol_type = other DNA
gtaaccacacaatgagttttagagctaccgacgtctacggacgggagctattttttttcagccaactccaatttttttttagctcccgtccgtagacgtcgg

SEQ ID NO: 838 - DNA, 102 bp, synthetic construct
  source 1..102: mol_type = other DNA
gactctcttgtattcgttttagagctaccgacgtctacggacgggagctattttttttcagccaactccaatttttttttagctcccgtccgtagacgtcgg

SEQ ID NO: 839 - DNA, 102 bp, synthetic construct
  source 1..102: mol_type = other DNA
gaacaatggccaagcgttttagagctaccgacgtctacggacgggagctattttttttcagccaactccaatttttttttagctcccgtccgtagacgtcgg

SEQ ID NO: 840 - DNA, 102 bp, synthetic construct
  source 1..102: mol_type = other DNA
gttctgtcttcaatagttttagagctaccgacgtctacggacgggagctattttttttcagccaactccaatttttttttagctcccgtccgtagacgtcgg

SEQ ID NO: 841 - DNA, 102 bp, synthetic construct
  source 1..102: mol_type = other DNA
gctctagacaacctcgttttagagctaccgacgtctacggacgggagctattttttttcagccaactccaatttttttttagctcccgtccgtagacgtcgg

SEQ ID NO: 842 - DNA, 101 bp, synthetic construct
  source 1..101: mol_type = other DNA
gacaagttgtttacgttttagagctaccgacgtctacggacgggagctattttttttcagccaactccaatttttttttagctcccgtccgtagacgtcgg

SEQ ID NO: 843 - DNA, 102 bp, synthetic construct
  source 1..102: mol_type = other DNA
gagagagcctagaaagttttagagctaccgacgtctacggacgggagctattttttttcagccaactccaatttttttttagctcccgtccgtagacgtcgg

SEQ ID NO: 844 - DNA, 101 bp, synthetic construct
  source 1..101: mol_type = other DNA
ggtcaaggagtcctgttttagagctaccgacgtctacggacgggagctattttttttcagccaactccaatttttttttagctcccgtccgtagacgtcgg

SEQ ID NO: 845 - DNA, 102 bp, synthetic construct
  source 1..102: mol_type = other DNA
gttgagagcaacacggttttagagctaccgacgtctacggacgggagctattttttttcagccaactccaatttttttttagctcccgtccgtagacgtcgg

SEQ ID NO: 846 - DNA, 102 bp, synthetic construct
  source 1..102: mol_type = other DNA
gtcatgaccagcaaagttttagagctaccgacgtctacggacgggagctattttttttcagccaactccaatttttttttagctcccgtccgtagacgtcgg

SEQ ID NO: 847 - DNA, 102 bp, synthetic construct
  source 1..102: mol_type = other DNA
gcggtcaccgcggccgttttagagctaccgacgtctacggacgggagctattttttttcagccaactccaatttttttttagctcccgtccgtagacgtcgg

SEQ ID NO: 848 - DNA, 101 bp, synthetic construct
  source 1..101: mol_type = other DNA
gtgcaaataacaaagttttagagctaccgacgtctacggacgggagctattttttttcagccaactccaatttttttttagctcccgtccgtagacgtcgg

SEQ ID NO: 849 - DNA, 102 bp, synthetic construct
  source 1..102: mol_type = other DNA
gtaaccacacaatgagttttagagctaccaaagctcattcgcgactgagcttttttttcagccaactccaattttttttgctcagtcgcgaatgagctttgg

SEQ ID NO: 850 - DNA, 102 bp, synthetic construct
  source 1..102: mol_type = other DNA
gactctcttgtattcgttttagagctaccaaagctcattcgcgactgagcttttttttcagccaactccaattttttttgctcagtcgcgaatgagctttgg

SEQ ID NO: 851 - DNA, 102 bp, synthetic construct
  source 1..102: mol_type = other DNA
gaacaatggccaagcgttttagagctaccaaagctcattcgcgactgagcttttttttcagccaactccaattttttttgctcagtcgcgaatgagctttgg

SEQ ID NO: 852 - DNA, 102 bp, synthetic construct
  source 1..102: mol_type = other DNA
gttctgtcttcaatagttttagagctaccaaagctcattcgcgactgagcttttttttcagccaactccaattttttttgctcagtcgcgaatgagctttgg

SEQ ID NO: 853 - DNA, 102 bp, synthetic construct
  source 1..102: mol_type = other DNA
gctctagacaacctcgttttagagctaccaaagctcattcgcgactgagcttttttttcagccaactccaattttttttgctcagtcgcgaatgagctttgg

SEQ ID NO: 854 - DNA, 101 bp, synthetic construct
  source 1..101: mol_type = other DNA
gacaagttgtttacgttttagagctaccaaagctcattcgcgactgagcttttttttcagccaactccaattttttttgctcagtcgcgaatgagctttgg

SEQ ID NO: 855 - DNA, 102 bp, synthetic construct
  source 1..102: mol_type = other DNA
gagagagcctagaaagttttagagctaccaaagctcattcgcgactgagcttttttttcagccaactccaattttttttgctcagtcgcgaatgagctttgg

SEQ ID NO: 856 - DNA, 101 bp, synthetic construct
  source 1..101: mol_type = other DNA
ggtcaaggagtcctgttttagagctaccaaagctcattcgcgactgagcttttttttcagccaactccaattttttttgctcagtcgcgaatgagctttgg

SEQ ID NO: 857 - DNA, 102 bp, synthetic construct
  source 1..102: mol_type = other DNA
gttgagagcaacacggttttagagctaccaaagctcattcgcgactgagcttttttttcagccaactccaattttttttgctcagtcgcgaatgagctttgg

SEQ ID NO: 858 - DNA, 102 bp, synthetic construct
  source 1..102: mol_type = other DNA
gtcatgaccagcaaagttttagagctaccaaagctcattcgcgactgagcttttttttcagccaactccaattttttttgctcagtcgcgaatgagctttgg

SEQ ID NO: 859 - DNA, 102 bp, synthetic construct
  source 1..102: mol_type = other DNA
gcggtcaccgcggccgttttagagctaccaaagctcattcgcgactgagcttttttttcagccaactccaattttttttgctcagtcgcgaatgagctttgg

SEQ ID NO: 860 - DNA, 101 bp, synthetic construct
  source 1..101: mol_type = other DNA
gtgcaaataacaaagttttagagctaccaaagctcattcgcgactgagcttttttttcagccaactccaattttttttgctcagtcgcgaatgagctttgg

SEQ ID NO: 861 - DNA, 102 bp, synthetic construct
  source 1..102: mol_type = other DNA
gtaaccacacaatgagttttagagctaccatggcacgatcgacacggaggttttttttcagccaactccaattttttttcctccgtgtcgatcgtgccatgg

SEQ ID NO: 862 - DNA, 102 bp, synthetic construct
  source 1..102: mol_type = other DNA
gactctcttgtattcgttttagagctaccatggcacgatcgacacggaggttttttttcagccaactccaattttttttcctccgtgtcgatcgtgccatgg

SEQ ID NO: 863 - DNA, 102 bp, synthetic construct
  source 1..102: mol_type = other DNA
gaacaatggccaagcgttttagagctaccatggcacgatcgacacggaggttttttttcagccaactccaattttttttcctccgtgtcgatcgtgccatgg

SEQ ID NO: 864 - DNA, 102 bp, synthetic construct
  source 1..102: mol_type = other DNA
gttctgtcttcaatagttttagagctaccatggcacgatcgacacggaggttttttttcagccaactccaattttttttcctccgtgtcgatcgtgccatgg

SEQ ID NO: 865 - DNA, 102 bp, synthetic construct
  source 1..102: mol_type = other DNA
gctctagacaacctcgttttagagctaccatggcacgatcgacacggaggttttttttcagccaactccaattttttttcctccgtgtcgatcgtgccatgg

SEQ ID NO: 866 - DNA, 101 bp, synthetic construct
  source 1..101: mol_type = other DNA
gacaagttgtttacgttttagagctaccatggcacgatcgacacggaggttttttttcagccaactccaattttttttcctccgtgtcgatcgtgccatgg

SEQ ID NO: 867 - DNA, 102 bp, synthetic construct
  source 1..102: mol_type = other DNA
gagagagcctagaaagttttagagctaccatggcacgatcgacacggaggttttttttcagccaactccaattttttttcctccgtgtcgatcgtgccatgg

SEQ ID NO: 868 - DNA, 101 bp, synthetic construct
  source 1..101: mol_type = other DNA
ggtcaaggagtcctgttttagagctaccatggcacgatcgacacggaggttttttttcagccaactccaattttttttcctccgtgtcgatcgtgccatgg

SEQ ID NO: 869 - DNA, 102 bp, synthetic construct
  source 1..102: mol_type = other DNA
gttgagagcaacacggttttagagctaccatggcacgatcgacacggaggttttttttcagccaactccaattttttttcctccgtgtcgatcgtgccatgg

SEQ ID NO: 870 - DNA, 102 bp, synthetic construct
  source 1..102: mol_type = other DNA
gtcatgaccagcaaagttttagagctaccatggcacgatcgacacggaggttttttttcagccaactccaattttttttcctccgtgtcgatcgtgccatgg

SEQ ID NO: 871 - DNA, 102 bp, synthetic construct
  source 1..102: mol_type = other DNA
gcggtcaccgcggccgttttagagctaccatggcacgatcgacacggaggttttttttcagccaactccaattttttttcctccgtgtcgatcgtgccatgg

SEQ ID NO: 872 - DNA, 101 bp, synthetic construct
  source 1..101: mol_type = other DNA
gtgcaaataacaaagttttagagctaccatggcacgatcgacacggaggttttttttcagccaactccaattttttttcctccgtgtcgatcgtgccatgg

SEQ ID NO: 873 - DNA, 102 bp, synthetic construct
  source 1..102: mol_type = other DNA
gtaaccacacaatgagttttagagctacccgaactctctatcgaacgagtttttttttcagccaactccaattttttttactcgttcgatagagagttcggg

SEQ ID NO: 874 - DNA, 102 bp, synthetic construct
  source 1..102: mol_type = other DNA
gactctcttgtattcgttttagagctacccgaactctctatcgaacgagtttttttttcagccaactccaattttttttactcgttcgatagagagttcggg

SEQ ID NO: 875 - DNA, 102 bp, synthetic construct
  source 1..102: mol_type = other DNA
gaacaatggccaagcgttttagagctacccgaactctctatcgaacgagtttttttttcagccaactccaattttttttactcgttcgatagagagttcggg

SEQ ID NO: 876 - DNA, 102 bp, synthetic construct
  source 1..102: mol_type = other DNA
gttctgtcttcaatagttttagagctacccgaactctctatcgaacgagtttttttttcagccaactccaattttttttactcgttcgatagagagttcggg

SEQ ID NO: 877 - DNA, 102 bp, synthetic construct
  source 1..102: mol_type = other DNA
gctctagacaacctcgttttagagctacccgaactctctatcgaacgagtttttttttcagccaactccaattttttttactcgttcgatagagagttcggg

SEQ ID NO: 878 - DNA, 101 bp, synthetic construct
  source 1..101: mol_type = other DNA
gacaagttgtttacgttttagagctacccgaactctctatcgaacgagtttttttttcagccaactccaattttttttactcgttcgatagagagttcggg

SEQ ID NO: 879 - DNA, 102 bp, synthetic construct
  source 1..102: mol_type = other DNA
gagagagcctagaaagttttagagctacccgaactctctatcgaacgagtttttttttcagccaactccaattttttttactcgttcgatagagagttcggg

SEQ ID NO: 880 - DNA, 101 bp, synthetic construct
  source 1..101: mol_type = other DNA
ggtcaaggagtcctgttttagagctacccgaactctctatcgaacgagtttttttttcagccaactccaattttttttactcgttcgatagagagttcggg

SEQ ID NO: 881 - DNA, 102 bp, synthetic construct
  source 1..102: mol_type = other DNA
gttgagagcaacacggttttagagctacccgaactctctatcgaacgagtttttttttcagccaactccaattttttttactcgttcgatagagagttcggg

SEQ ID NO: 882 - DNA, 102 bp, synthetic construct
  source 1..102: mol_type = other DNA
gtcatgaccagcaaagttttagagctacccgaactctctatcgaacgagtttttttttcagccaactccaattttttttactcgttcgatagagagttcggg

SEQ ID NO: 883 - DNA, 102 bp, synthetic construct
  source 1..102: mol_type = other DNA
gcggtcaccgcggccgttttagagctacccgaactctctatcgaacgagtttttttttcagccaactccaattttttttactcgttcgatagagagttcggg

SEQ ID NO: 884 - DNA, 101 bp, synthetic construct
  source 1..101: mol_type = other DNA
gtgcaaataacaaagttttagagctacccgaactctctatcgaacgagtttttttttcagccaactccaattttttttactcgttcgatagagagttcggg

SEQ ID NO: 885 - DNA, 102 bp, synthetic construct
  source 1..102: mol_type = other DNA
gtaaccacacaatgagttttagagctacctacacgatagtggtcgtgcgcttttttttcagccaactccaattttttttgcgcacgaccactatcgtgtagg

SEQ ID NO: 886 - DNA, 102 bp, synthetic construct
  source 1..102: mol_type = other DNA
gactctcttgtattcgttttagagctacctacacgatagtggtcgtgcgcttttttttcagccaactccaattttttttgcgcacgaccactatcgtgtagg

SEQ ID NO: 887 - DNA, 102 bp, synthetic construct
  source 1..102: mol_type = other DNA
gaacaatggccaagcgttttagagctacctacacgatagtggtcgtgcgcttttttttcagccaactccaattttttttgcgcacgaccactatcgtgtagg

SEQ ID NO: 888 - DNA, 102 bp, synthetic construct
  source 1..102: mol_type = other DNA
gttctgtcttcaatagttttagagctacctacacgatagtggtcgtgcgcttttttttcagccaactccaattttttttgcgcacgaccactatcgtgtagg

SEQ ID NO: 889 - DNA, 102 bp, synthetic construct
  source 1..102: mol_type = other DNA
gctctagacaacctcgttttagagctacctacacgatagtggtcgtgcgcttttttttcagccaactccaattttttttgcgcacgaccactatcgtgtagg

SEQ ID NO: 890 - DNA, 101 bp, synthetic construct
  source 1..101: mol_type = other DNA
gacaagttgtttacgttttagagctacctacacgatagtggtcgtgcgcttttttttcagccaactccaattttttttgcgcacgaccactatcgtgtagg

SEQ ID NO: 891 - DNA, 102 bp, synthetic construct
  source 1..102: mol_type = other DNA
gagagagcctagaaagttttagagctacctacacgatagtggtcgtgcgcttttttttcagccaactccaattttttttgcgcacgaccactatcgtgtagg

SEQ ID NO: 892 - DNA, 101 bp, synthetic construct
  source 1..101: mol_type = other DNA
ggtcaaggagtcctgttttagagctacctacacgatagtggtcgtgcgcttttttttcagccaactccaattttttttgcgcacgaccactatcgtgtagg

SEQ ID NO: 893 - DNA, 102 bp, synthetic construct
  source 1..102: mol_type = other DNA
gttgagagcaacacggttttagagctacctacacgatagtggtcgtgcgcttttttttcagccaactccaattttttttgcgcacgaccactatcgtgtagg

SEQ ID NO: 894 - DNA, 102 bp, synthetic construct
  source 1..102: mol_type = other DNA
gtcatgaccagcaaagttttagagctacctacacgatagtggtcgtgcgcttttttttcagccaactccaattttttttgcgcacgaccactatcgtgtagg

SEQ ID NO: 895 - DNA, 102 bp, synthetic construct
  source 1..102: mol_type = other DNA
gcggtcaccgcggccgttttagagctacctacacgatagtggtcgtgcgcttttttttcagccaactccaattttttttgcgcacgaccactatcgtgtagg

SEQ ID NO: 896 - DNA, 101 bp, synthetic construct
  source 1..101: mol_type = other DNA
gtgcaaataacaaagttttagagctacctacacgatagtggtcgtgcgcttttttttcagccaactccaattttttttgcgcacgaccactatcgtgtagg

SEQ ID NO: 897 - DNA, 102 bp, synthetic construct
  source 1..102: mol_type = other DNA
gtaaccacacaatgagttttagagctaccctggcggaacgttcgagtaatttttttttcagccaactccaattttttttattactcgaacgttccgccaggg

SEQ ID NO: 898 - DNA, 102 bp, synthetic construct
  source 1..102: mol_type = other DNA
gactctcttgtattcgttttagagctaccctggcggaacgttcgagtaatttttttttcagccaactccaattttttttattactcgaacgttccgccaggg

SEQ ID NO: 899 - DNA, 102 bp, synthetic construct
  source 1..102: mol_type = other DNA
gaacaatggccaagcgttttagagctaccctggcggaacgttcgagtaatttttttttcagccaactccaattttttttattactcgaacgttccgccaggg

SEQ ID NO: 900 - DNA, 102 bp, synthetic construct
  source 1..102: mol_type = other DNA
gttctgtcttcaatagttttagagctaccctggcggaacgttcgagtaatttttttttcagccaactccaattttttttattactcgaacgttccgccaggg

SEQ ID NO: 901 - DNA, 102 bp, synthetic construct
  source 1..102: mol_type = other DNA
gctctagacaacctcgttttagagctaccctggcggaacgttcgagtaatttttttttcagccaactccaattttttttattactcgaacgttccgccaggg

SEQ ID NO: 902 - DNA, 101 bp, synthetic construct
  source 1..101: mol_type = other DNA
gacaagttgtttacgttttagagctaccctggcggaacgttcgagtaatttttttttcagccaactccaattttttttattactcgaacgttccgccaggg

SEQ ID NO: 903 - DNA, 102 bp, synthetic construct
  source 1..102: mol_type = other DNA
gagagagcctagaaagttttagagctaccctggcggaacgttcgagtaatttttttttcagccaactccaattttttttattactcgaacgttccgccaggg

SEQ ID NO: 904 - DNA, 101 bp, synthetic construct
  source 1..101: mol_type = other DNA
ggtcaaggagtcctgttttagagctaccctggcggaacgttcgagtaatttttttttcagccaactccaattttttttattactcgaacgttccgccaggg

SEQ ID NO: 905 - DNA, 102 bp, synthetic construct
  source 1..102: mol_type = other DNA
gttgagagcaacacggttttagagctaccctggcggaacgttcgagtaatttttttttcagccaactccaattttttttattactcgaacgttccgccaggg

SEQ ID NO: 906 - DNA, 102 bp, synthetic construct
  source 1..102: mol_type = other DNA
gtcatgaccagcaaagttttagagctaccctggcggaacgttcgagtaatttttttttcagccaactccaattttttttattactcgaacgttccgccaggg

SEQ ID NO: 907 - DNA, 102 bp, synthetic construct
  source 1..102: mol_type = other DNA
gcggtcaccgcggccgttttagagctaccctggcggaacgttcgagtaatttttttttcagccaactccaattttttttattactcgaacgttccgccaggg

SEQ ID NO: 908 - DNA, 101 bp, synthetic construct
  source 1..101: mol_type = other DNA
gtgcaaataacaaagttttagagctaccctggcggaacgttcgagtaatttttttttcagccaactccaattttttttattactcgaacgttccgccaggg

SEQ ID NO: 909 - DNA, 102 bp, synthetic construct
  source 1..102: mol_type = other DNA
gtaaccacacaatgagttttagagctacctacactcgacatcggtagctattttttttcagccaactccaatttttttttagctaccgatgtcgagtgtagg

SEQ ID NO: 910 - DNA, 102 bp, synthetic construct
  source 1..102: mol_type = other DNA
gactctcttgtattcgttttagagctacctacactcgacatcggtagctattttttttcagccaactccaatttttttttagctaccgatgtcgagtgtagg

SEQ ID NO: 911 - DNA, 102 bp, synthetic construct
  source 1..102: mol_type = other DNA
gaacaatggccaagcgttttagagctacctacactcgacatcggtagctattttttttcagccaactccaatttttttttagctaccgatgtcgagtgtagg

SEQ ID NO: 912 - DNA, 102 bp, synthetic construct
  source 1..102: mol_type = other DNA
gttctgtcttcaatagttttagagctacctacactcgacatcggtagctattttttttcagccaactccaatttttttttagctaccgatgtcgagtgtagg

SEQ ID NO: 913 - DNA, 102 bp, synthetic construct
  source 1..102: mol_type = other DNA
gctctagacaacctcgttttagagctacctacactcgacatcggtagctattttttttcagccaactccaatttttttttagctaccgatgtcgagtgtagg

SEQ ID NO: 914 - DNA, 101 bp, synthetic construct
  source 1..101: mol_type = other DNA
gacaagttgtttacgttttagagctacctacactcgacatcggtagctattttttttcagccaactccaatttttttttagctaccgatgtcgagtgtagg

SEQ ID NO: 915 - DNA, 102 bp, synthetic construct
  source 1..102: mol_type = other DNA
gagagagcctagaaagttttagagctacctacactcgacatcggtagctattttttttcagccaactccaatttttttttagctaccgatgtcgagtgtagg

SEQ ID NO: 916 - DNA, 101 bp, synthetic construct
  source 1..101: mol_type = other DNA
ggtcaaggagtcctgttttagagctacctacactcgacatcggtagctattttttttcagccaactccaatttttttttagctaccgatgtcgagtgtagg

SEQ ID NO: 917 - DNA, 102 bp, synthetic construct
  source 1..102: mol_type = other DNA
gttgagagcaacacggttttagagctacctacactcgacatcggtagctattttttttcagccaactccaatttttttttagctaccgatgtcgagtgtagg

SEQ ID NO: 918 - DNA, 102 bp, synthetic construct
  source 1..102: mol_type = other DNA
gtcatgaccagcaaagttttagagctacctacactcgacatcggtagctattttttttcagccaactccaatttttttttagctaccgatgtcgagtgtagg

SEQ ID NO: 919 - DNA, 102 bp, synthetic construct
  source 1..102: mol_type = other DNA
gcggtcaccgcggccgttttagagctacctacactcgacatcggtagctattttttttcagccaactccaatttttttttagctaccgatgtcgagtgtagg

SEQ ID NO: 920 - DNA, 101 bp, synthetic construct
  source 1..101: mol_type = other DNA
gtgcaaataacaaagttttagagctacctacactcgacatcggtagctattttttttcagccaactccaatttttttttagctaccgatgtcgagtgtagg

SEQ ID NO: 921 - DNA, 104 bp, synthetic construct
  source 1..104: mol_type = other DNA
gccaaatgcaaggatgttttagagctaccgtcgttgtaccgtctacttgacttttttttcagccaactccaattttttttgtcaagtagacggtacaacgacgg

SEQ ID NO: 922 - DNA, 104 bp, synthetic construct
  source 1..104: mol_type = other DNA
gccaatccttgcattgttttagagctaccgtcgttgtaccgtctacttgacttttttttcagccaactccaattttttttgtcaagtagacggtacaacgacgg

SEQ ID NO: 923 - DNA, 103 bp, synthetic construct
  source 1..103: mol_type = other DNA
gtgatagttagcaagttttagagctaccgtcgttgtaccgtctacttgacttttttttcagccaactccaattttttttgtcaagtagacggtacaacgacgg

SEQ ID NO: 924 - DNA, 104 bp, synthetic construct
  source 1..104: mol_type = other DNA
gtgaaaaagaactccgttttagagctaccgtcgttgtaccgtctacttgacttttttttcagccaactccaattttttttgtcaagtagacggtacaacgacgg

SEQ ID NO: 925 - DNA, 104 bp, synthetic construct
  source 1..104: mol_type = other DNA
gataagctcaaaagcgttttagagctaccgtcgttgtaccgtctacttgacttttttttcagccaactccaattttttttgtcaagtagacggtacaacgacgg

SEQ ID NO: 926 - DNA, 104 bp, synthetic construct
  source 1..104: mol_type = other DNA
gagttggagttactagttttagagctaccgtcgttgtaccgtctacttgacttttttttcagccaactccaattttttttgtcaagtagacggtacaacgacgg

SEQ ID NO: 927 - DNA, 104 bp, synthetic construct
  source 1..104: mol_type = other DNA
gttcaaggacatgaagttttagagctaccgtcgttgtaccgtctacttgacttttttttcagccaactccaattttttttgtcaagtagacggtacaacgacgg

SEQ ID NO: 928 - DNA, 104 bp, synthetic construct
  source 1..104: mol_type = other DNA
gaactacactcagttgttttagagctaccgtcgttgtaccgtctacttgacttttttttcagccaactccaattttttttgtcaagtagacggtacaacgacgg

SEQ ID NO: 929 - DNA, 103 bp, synthetic construct
  source 1..103: mol_type = other DNA
gggttccacgccttgttttagagctaccgtcgttgtaccgtctacttgacttttttttcagccaactccaattttttttgtcaagtagacggtacaacgacgg

SEQ ID NO: 930 - DNA, 103 bp, synthetic construct
  source 1..103: mol_type = other DNA
gtttgttctacctagttttagagctaccgtcgttgtaccgtctacttgacttttttttcagccaactccaattttttttgtcaagtagacggtacaacgacgg

SEQ ID NO: 931 - DNA, 103 bp, synthetic construct
  source 1..103: mol_type = other DNA
gagcaaaacaatttgttttagagctaccgtcgttgtaccgtctacttgacttttttttcagccaactccaattttttttgtcaagtagacggtacaacgacgg

SEQ ID NO: 932 - DNA, 104 bp, synthetic construct
  source 1..104: mol_type = other DNA
gtaaatgtgcctgacgttttagagctaccgtcgttgtaccgtctacttgacttttttttcagccaactccaattttttttgtcaagtagacggtacaacgacgg

SEQ ID NO: 933 - DNA, 104 bp, synthetic construct
  source 1..104: mol_type = other DNA
gtgatgttgcacgacgttttagagctaccgtcgttgtaccgtctacttgacttttttttcagccaactccaattttttttgtcaagtagacggtacaacgacgg

SEQ ID NO: 934 - DNA, 104 bp, synthetic construct
  source 1..104: mol_type = other DNA
gtgaagcaactactagttttagagctaccgtcgttgtaccgtctacttgacttttttttcagccaactccaattttttttgtcaagtagacggtacaacgacgg

SEQ ID NO: 935 - DNA, 104 bp, synthetic construct
  source 1..104: mol_type = other DNA
gatcggcgagaccaggttttagagctaccgtcgttgtaccgtctacttgacttttttttcagccaactccaattttttttgtcaagtagacggtacaacgacgg

SEQ ID NO: 936 - DNA, 104 bp, synthetic construct
  source 1..104: mol_type = other DNA
gtgagacaagaggcggttttagagctaccgtcgttgtaccgtctacttgacttttttttcagccaactccaattttttttgtcaagtagacggtacaacgacgg

SEQ ID NO: 937 - DNA, 104 bp, synthetic construct
  source 1..104: mol_type = other DNA
gccaaatgcaaggatgttttagagctaccttcccgacttccgtaggagcgcttttttttcagccaactccaattttttttgcgctcctacggaagtcgggaagg

SEQ ID NO: 938 - DNA, 104 bp, synthetic construct
  source 1..104: mol_type = other DNA
gccaatccttgcattgttttagagctaccttcccgacttccgtaggagcgcttttttttcagccaactccaattttttttgcgctcctacggaagtcgggaagg

SEQ ID NO: 939 - DNA, 103 bp, synthetic construct
  source 1..103: mol_type = other DNA
gtgatagttagcaagttttagagctaccttcccgacttccgtaggagcgcttttttttcagccaactccaattttttttgcgctcctacggaagtcgggaagg

SEQ ID NO: 940 - DNA, 104 bp, synthetic construct
  source 1..104: mol_type = other DNA
gtgaaaaagaactccgttttagagctaccttcccgacttccgtaggagcgcttttttttcagccaactccaattttttttgcgctcctacggaagtcgggaagg

SEQ ID NO: 941 - DNA, 104 bp, synthetic construct
  source 1..104: mol_type = other DNA
gataagctcaaaagcgttttagagctaccttcccgacttccgtaggagcgcttttttttcagccaactccaattttttttgcgctcctacggaagtcgggaagg

SEQ ID NO: 942 - DNA, 104 bp, synthetic construct
  source 1..104: mol_type = other DNA
gagttggagttactagttttagagctaccttcccgacttccgtaggagcgcttttttttcagccaactccaattttttttgcgctcctacggaagtcgggaagg

SEQ ID NO: 943 - DNA, 104 bp, synthetic construct
  source 1..104: mol_type = other DNA
gttcaaggacatgaagttttagagctaccttcccgacttccgtaggagcgcttttttttcagccaactccaattttttttgcgctcctacggaagtcgggaagg

SEQ ID NO: 944 - DNA, 104 bp, synthetic construct
  source 1..104: mol_type = other DNA
gaactacactcagttgttttagagctaccttcccgacttccgtaggagcgcttttttttcagccaactccaattttttttgcgctcctacggaagtcgggaagg

SEQ ID NO: 945 - DNA, 103 bp, synthetic construct
  source 1..103: mol_type = other DNA
gggttccacgccttgttttagagctaccttcccgacttccgtaggagcgcttttttttcagccaactccaattttttttgcgctcctacggaagtcgggaagg

SEQ ID NO: 946 - DNA, 103 bp, synthetic construct
  source 1..103: mol_type = other DNA
gtttgttctacctagttttagagctaccttcccgacttccgtaggagcgcttttttttcagccaactccaattttttttgcgctcctacggaagtcgggaagg

SEQ ID NO: 947 - DNA, 103 bp, synthetic construct
  source 1..103: mol_type = other DNA
gagcaaaacaatttgttttagagctaccttcccgacttccgtaggagcgcttttttttcagccaactccaattttttttgcgctcctacggaagtcgggaagg

SEQ ID NO: 948 - DNA, 104 bp, synthetic construct
  source 1..104: mol_type = other DNA
gtaaatgtgcctgacgttttagagctaccttcccgacttccgtaggagcgcttttttttcagccaactccaattttttttgcgctcctacggaagtcgggaagg

SEQ ID NO: 949 - DNA, 104 bp, synthetic construct
  source 1..104: mol_type = other DNA
gtgatgttgcacgacgttttagagctaccttcccgacttccgtaggagcgcttttttttcagccaactccaattttttttgcgctcctacggaagtcgggaagg

SEQ ID NO: 950 - DNA, 104 bp, synthetic construct
  source 1..104: mol_type = other DNA
gtgaagcaactactagttttagagctaccttcccgacttccgtaggagcgcttttttttcagccaactccaattttttttgcgctcctacggaagtcgggaagg

SEQ ID NO: 951 - DNA, 104 bp, synthetic construct
  source 1..104: mol_type = other DNA
gatcggcgagaccaggttttagagctaccttcccgacttccgtaggagcgcttttttttcagccaactccaattttttttgcgctcctacggaagtcgggaagg

SEQ ID NO: 952 - DNA, 104 bp, synthetic construct
  source 1..104: mol_type = other DNA
gtgagacaagaggcggttttagagctaccttcccgacttccgtaggagcgcttttttttcagccaactccaattttttttgcgctcctacggaagtcgggaagg

SEQ ID NO: 953 - DNA, 104 bp, synthetic construct
  source 1..104: mol_type = other DNA
gccaaatgcaaggatgttttagagctacctgaaggtaaagatcgggtcctcttttttttcagccaactccaattttttttgaggacccgatctttaccttcagg

SEQ ID NO: 954 - DNA, 104 bp, synthetic construct
  source 1..104: mol_type = other DNA
gccaatccttgcattgttttagagctacctgaaggtaaagatcgggtcctcttttttttcagccaactccaattttttttgaggacccgatctttaccttcagg

SEQ ID NO: 955 - DNA, 103 bp, synthetic construct
  source 1..103: mol_type = other DNA
gtgatagttagcaagttttagagctacctgaaggtaaagatcgggtcctcttttttttcagccaactccaattttttttgaggacccgatctttaccttcagg

SEQ ID NO: 956 - DNA, 104 bp, synthetic construct
  source 1..104: mol_type = other DNA
gtgaaaaagaactccgttttagagctacctgaaggtaaagatcgggtcctcttttttttcagccaactccaattttttttgaggacccgatctttaccttcagg

SEQ ID NO: 957 - DNA, 104 bp, synthetic construct
  source 1..104: mol_type = other DNA
gataagctcaaaagcgttttagagctacctgaaggtaaagatcgggtcctcttttttttcagccaactccaattttttttgaggacccgatctttaccttcagg

SEQ ID NO: 958 - DNA, 104 bp, synthetic construct
  source 1..104: mol_type = other DNA
gagttggagttactagttttagagctacctgaaggtaaagatcgggtcctcttttttttcagccaactccaattttttttgaggacccgatctttaccttcagg

SEQ ID NO: 959 - DNA, 104 bp, synthetic construct
  source 1..104: mol_type = other DNA
gttcaaggacatgaagttttagagctacctgaaggtaaagatcgggtcctcttttttttcagccaactccaattttttttgaggacccgatctttaccttcagg

SEQ ID NO: 960 - DNA, 104 bp, synthetic construct
  source 1..104: mol_type = other DNA
gaactacactcagttgttttagagctacctgaaggtaaagatcgggtcctcttttttttcagccaactccaattttttttgaggacccgatctttaccttcagg

SEQ ID NO: 961 - DNA, 103 bp, synthetic construct
  source 1..103: mol_type = other DNA
gggttccacgccttgttttagagctacctgaaggtaaagatcgggtcctcttttttttcagccaactccaattttttttgaggacccgatctttaccttcagg

SEQ ID NO: 962 - DNA, 103 bp, synthetic construct
  source 1..103: mol_type = other DNA
gtttgttctacctagttttagagctacctgaaggtaaagatcgggtcctcttttttttcagccaactccaattttttttgaggacccgatctttaccttcagg

SEQ ID NO: 963 - DNA, 103 bp, synthetic construct
  source 1..103: mol_type = other DNA
gagcaaaacaatttgttttagagctacctgaaggtaaagatcgggtcctcttttttttcagccaactccaattttttttgaggacccgatctttaccttcagg

SEQ ID NO: 964 - DNA, 104 bp, synthetic construct
  source 1..104: mol_type = other DNA
gtaaatgtgcctgacgttttagagctacctgaaggtaaagatcgggtcctcttttttttcagccaactccaattttttttgaggacccgatctttaccttcagg

SEQ ID NO: 965 - DNA, 104 bp, synthetic construct
  source 1..104: mol_type = other DNA
gtgatgttgcacgacgttttagagctacctgaaggtaaagatcgggtcctcttttttttcagccaactccaattttttttgaggacccgatctttaccttcagg

SEQ ID NO: 966 - DNA, 104 bp, synthetic construct
  source 1..104: mol_type = other DNA
gtgaagcaactactagttttagagctacctgaaggtaaagatcgggtcctcttttttttcagccaactccaattttttttgaggacccgatctttaccttcagg

SEQ ID NO: 967 - DNA, 104 bp, synthetic construct
  source 1..104: mol_type = other DNA
gatcggcgagaccaggttttagagctacctgaaggtaaagatcgggtcctcttttttttcagccaactccaattttttttgaggacccgatctttaccttcagg

SEQ ID NO: 968 - DNA, 104 bp, synthetic construct
  source 1..104: mol_type = other DNA
gtgagacaagaggcggttttagagctacctgaaggtaaagatcgggtcctcttttttttcagccaactccaattttttttgaggacccgatctttaccttcagg

SEQ ID NO: 969 - DNA, 102 bp, synthetic construct
  source 1..102: mol_type = other DNA
gccaaatgcaaggatgttttagagctacctggttatagcggacgcactgtttttttttcagccaactccaattttttttacagtgcgtccgctataaccagg

SEQ ID NO: 970 - DNA, 102 bp, synthetic construct
  source 1..102: mol_type = other DNA
gccaatccttgcattgttttagagctacctggttatagcggacgcactgtttttttttcagccaactccaattttttttacagtgcgtccgctataaccagg

SEQ ID NO: 971 - DNA, 101 bp, synthetic construct
  source 1..101: mol_type = other DNA
gtgatagttagcaagttttagagctacctggttatagcggacgcactgtttttttttcagccaactccaattttttttacagtgcgtccgctataaccagg

SEQ ID NO: 972 - DNA, 102 bp, synthetic construct
  source 1..102: mol_type = other DNA
gtgaaaaagaactccgttttagagctacctggttatagcggacgcactgtttttttttcagccaactccaattttttttacagtgcgtccgctataaccagg

SEQ ID NO: 973 - DNA, 102 bp, synthetic construct
  source 1..102: mol_type = other DNA
gataagctcaaaagcgttttagagctacctggttatagcggacgcactgtttttttttcagccaactccaattttttttacagtgcgtccgctataaccagg

SEQ ID NO: 974 - DNA, 102 bp, synthetic construct
  source 1..102: mol_type = other DNA
gagttggagttactagttttagagctacctggttatagcggacgcactgtttttttttcagccaactccaattttttttacagtgcgtccgctataaccagg

SEQ ID NO: 975 - DNA, 102 bp, synthetic construct
  source 1..102: mol_type = other DNA
gttcaaggacatgaagttttagagctacctggttatagcggacgcactgtttttttttcagccaactccaattttttttacagtgcgtccgctataaccagg

SEQ ID NO: 976 - DNA, 102 bp, synthetic construct
  source 1..102: mol_type = other DNA
gaactacactcagttgttttagagctacctggttatagcggacgcactgtttttttttcagccaactccaattttttttacagtgcgtccgctataaccagg

SEQ ID NO: 977 - DNA, 101 bp, synthetic construct
  source 1..101: mol_type = other DNA
gggttccacgccttgttttagagctacctggttatagcggacgcactgtttttttttcagccaactccaattttttttacagtgcgtccgctataaccagg

SEQ ID NO: 978 - DNA, 101 bp, synthetic construct
  source 1..101: mol_type = other DNA
gtttgttctacctagttttagagctacctggttatagcggacgcactgtttttttttcagccaactccaattttttttacagtgcgtccgctataaccagg

SEQ ID NO: 979 - DNA, 101 bp, synthetic construct
  source 1..101: mol_type = other DNA
gagcaaaacaatttgttttagagctacctggttatagcggacgcactgtttttttttcagccaactccaattttttttacagtgcgtccgctataaccagg

SEQ ID NO: 980 - DNA, 102 bp, synthetic construct
  source 1..102: mol_type = other DNA
gtaaatgtgcctgacgttttagagctacctggttatagcggacgcactgtttttttttcagccaactccaattttttttacagtgcgtccgctataaccagg

SEQ ID NO: 981 - DNA, 102 bp, synthetic construct
  source 1..102: mol_type = other DNA
gtgatgttgcacgacgttttagagctacctggttatagcggacgcactgtttttttttcagccaactccaattttttttacagtgcgtccgctataaccagg

SEQ ID NO: 982 - DNA, 102 bp, synthetic construct
  source 1..102: mol_type = other DNA
gtgaagcaactactagttttagagctacctggttatagcggacgcactgtttttttttcagccaactccaattttttttacagtgcgtccgctataaccagg

SEQ ID NO: 983 - DNA, 102 bp, synthetic construct
  source 1..102: mol_type = other DNA
gatcggcgagaccaggttttagagctacctggttatagcggacgcactgtttttttttcagccaactccaattttttttacagtgcgtccgctataaccagg

SEQ ID NO: 984 - DNA, 102 bp, synthetic construct
  source 1..102: mol_type = other DNA
gtgagacaagaggcggttttagagctacctggttatagcggacgcactgtttttttttcagccaactccaattttttttacagtgcgtccgctataaccagg

SEQ ID NO: 985 - DNA, 102 bp, synthetic construct
  source 1..102: mol_type = other DNA
gccaaatgcaaggatgttttagagctaccgcatcgtattatctgcgaagcttttttttcagccaactccaattttttttgcttcgcagataatacgatgcgg

SEQ ID NO: 986 - DNA, 102 bp, synthetic construct
  source 1..102: mol_type = other DNA
gccaatccttgcattgttttagagctaccgcatcgtattatctgcgaagcttttttttcagccaactccaattttttttgcttcgcagataatacgatgcgg

SEQ ID NO: 987 - DNA, 101 bp, synthetic construct
  source 1..101: mol_type = other DNA
gtgatagttagcaagttttagagctaccgcatcgtattatctgcgaagcttttttttcagccaactccaattttttttgcttcgcagataatacgatgcgg

SEQ ID NO: 988 - DNA, 102 bp, synthetic construct
  source 1..102: mol_type = other DNA
gtgaaaaagaactccgttttagagctaccgcatcgtattatctgcgaagcttttttttcagccaactccaattttttttgcttcgcagataatacgatgcgg

SEQ ID NO: 989 - DNA, 102 bp, synthetic construct
  source 1..102: mol_type = other DNA
gataagctcaaaagcgttttagagctaccgcatcgtattatctgcgaagcttttttttcagccaactccaattttttttgcttcgcagataatacgatgcgg

SEQ ID NO: 990 - DNA, 102 bp, synthetic construct
  source 1..102: mol_type = other DNA
gagttggagttactagttttagagctaccgcatcgtattatctgcgaagcttttttttcagccaactccaattttttttgcttcgcagataatacgatgcgg

SEQ ID NO: 991 - DNA, 102 bp, synthetic construct
  source 1..102: mol_type = other DNA
gttcaaggacatgaagttttagagctaccgcatcgtattatctgcgaagcttttttttcagccaactccaattttttttgcttcgcagataatacgatgcgg

SEQ ID NO: 992 - DNA, 102 bp, synthetic construct
  source 1..102: mol_type = other DNA
gaactacactcagttgttttagagctaccgcatcgtattatctgcgaagcttttttttcagccaactccaattttttttgcttcgcagataatacgatgcgg

SEQ ID NO: 993 - DNA, 101 bp, synthetic construct
  source 1..101: mol_type = other DNA
gggttccacgccttgttttagagctaccgcatcgtattatctgcgaagcttttttttcagccaactccaattttttttgcttcgcagataatacgatgcgg

SEQ ID NO: 994 - DNA, 101 bp, synthetic construct
  source 1..101: mol_type = other DNA
gtttgttctacctagttttagagctaccgcatcgtattatctgcgaagcttttttttcagccaactccaattttttttgcttcgcagataatacgatgcgg

SEQ ID NO: 995 - DNA, 101 bp, synthetic construct
  source 1..101: mol_type = other DNA
gagcaaaacaatttgttttagagctaccgcatcgtattatctgcgaagcttttttttcagccaactccaattttttttgcttcgcagataatacgatgcgg

SEQ ID NO: 996 - DNA, 102 bp, synthetic construct
  source 1..102: mol_type = other DNA
gtaaatgtgcctgacgttttagagctaccgcatcgtattatctgcgaagcttttttttcagccaactccaattttttttgcttcgcagataatacgatgcgg

SEQ ID NO: 997 - DNA, 102 bp, synthetic construct
  source 1..102: mol_type = other DNA
gtgatgttgcacgacgttttagagctaccgcatcgtattatctgcgaagcttttttttcagccaactccaattttttttgcttcgcagataatacgatgcgg

SEQ ID NO: 998 - DNA, 102 bp, synthetic construct
  source 1..102: mol_type = other DNA
gtgaagcaactactagttttagagctaccgcatcgtattatctgcgaagcttttttttcagccaactccaattttttttgcttcgcagataatacgatgcgg

SEQ ID NO: 999 - DNA, 102 bp, synthetic construct
  source 1..102: mol_type = other DNA
gatcggcgagaccaggttttagagctaccgcatcgtattatctgcgaagcttttttttcagccaactccaattttttttgcttcgcagataatacgatgcgg

SEQ ID NO: 1000 - DNA, 102 bp, synthetic construct
  source 1..102: mol_type = other DNA
gtgagacaagaggcggttttagagctaccgcatcgtattatctgcgaagcttttttttcagccaactccaattttttttgcttcgcagataatacgatgcgg

SEQ ID NO: 1001 - DNA, 102 bp, synthetic construct
  source 1..102: mol_type = other DNA
gccaaatgcaaggatgttttagagctaccgctaggacgttcaacggagtcttttttttcagccaactccaattttttttgactccgttgaacgtcctagcgg

SEQ ID NO: 1002 - DNA, 102 bp, synthetic construct
  source 1..102: mol_type = other DNA
gccaatccttgcattgttttagagctaccgctaggacgttcaacggagtcttttttttcagccaactccaattttttttgactccgttgaacgtcctagcgg

SEQ ID NO: 1003 - DNA, 101 bp, synthetic construct
  source 1..101: mol_type = other DNA
gtgatagttagcaagttttagagctaccgctaggacgttcaacggagtcttttttttcagccaactccaattttttttgactccgttgaacgtcctagcgg

SEQ ID NO: 1004 - DNA, 102 bp, synthetic construct
  source 1..102: mol_type = other DNA
gtgaaaaagaactccgttttagagctaccgctaggacgttcaacggagtcttttttttcagccaactccaattttttttgactccgttgaacgtcctagcgg

SEQ ID NO: 1005 - DNA, 102 bp, synthetic construct
  source 1..102: mol_type = other DNA
gataagctcaaaagcgttttagagctaccgctaggacgttcaacggagtcttttttttcagccaactccaattttttttgactccgttgaacgtcctagcgg

SEQ ID NO: 1006 - DNA, 102 bp, synthetic construct
  source 1..102: mol_type = other DNA
gagttggagttactagttttagagctaccgctaggacgttcaacggagtcttttttttcagccaactccaattttttttgactccgttgaacgtcctagcgg

SEQ ID NO: 1007 - DNA, 102 bp, synthetic construct
  source 1..102: mol_type = other DNA
gttcaaggacatgaagttttagagctaccgctaggacgttcaacggagtcttttttttcagccaactccaattttttttgactccgttgaacgtcctagcgg

SEQ ID NO: 1008 - DNA, 102 bp, synthetic construct
  source 1..102: mol_type = other DNA
gaactacactcagttgttttagagctaccgctaggacgttcaacggagtcttttttttcagccaactccaattttttttgactccgttgaacgtcctagcgg

SEQ ID NO: 1009 - DNA, 101 bp, synthetic construct
  source 1..101: mol_type = other DNA
gggttccacgccttgttttagagctaccgctaggacgttcaacggagtcttttttttcagccaactccaattttttttgactccgttgaacgtcctagcgg

SEQ ID NO: 1010 - DNA, 101 bp, synthetic construct
  source 1..101: mol_type = other DNA
gtttgttctacctagttttagagctaccgctaggacgttcaacggagtcttttttttcagccaactccaattttttttgactccgttgaacgtcctagcgg

SEQ ID NO: 1011 - DNA, 101 bp, synthetic construct
  source 1..101: mol_type = other DNA
gagcaaaacaatttgttttagagctaccgctaggacgttcaacggagtcttttttttcagccaactccaattttttttgactccgttgaacgtcctagcgg

SEQ ID NO: 1012 - DNA, 102 bp, synthetic construct
  source 1..102: mol_type = other DNA
gtaaatgtgcctgacgttttagagctaccgctaggacgttcaacggagtcttttttttcagccaactccaattttttttgactccgttgaacgtcctagcgg

SEQ ID NO: 1013 - DNA, 102 bp, synthetic construct
  source 1..102: mol_type = other DNA
gtgatgttgcacgacgttttagagctaccgctaggacgttcaacggagtcttttttttcagccaactccaattttttttgactccgttgaacgtcctagcgg

SEQ ID NO: 1014 - DNA, 102 bp, synthetic construct
  source 1..102: mol_type = other DNA
gtgaagcaactactagttttagagctaccgctaggacgttcaacggagtcttttttttcagccaactccaattttttttgactccgttgaacgtcctagcgg

SEQ ID NO: 1015 - DNA, 102 bp, synthetic construct
  source 1..102: mol_type = other DNA
gatcggcgagaccaggttttagagctaccgctaggacgttcaacggagtcttttttttcagccaactccaattttttttgactccgttgaacgtcctagcgg

SEQ ID NO: 1016 - DNA, 102 bp, synthetic construct
  source 1..102: mol_type = other DNA
gtgagacaagaggcggttttagagctaccgctaggacgttcaacggagtcttttttttcagccaactccaattttttttgactccgttgaacgtcctagcgg

SEQ ID NO: 1017 - DNA, 102 bp, synthetic construct
  source 1..102: mol_type = other DNA
gccaaatgcaaggatgttttagagctaccatagcggtactatcggcatctttttttttcagccaactccaattttttttagatgccgatagtaccgctatgg

SEQ ID NO: 1018 - DNA, 102 bp, synthetic construct
  source 1..102: mol_type = other DNA
gccaatccttgcattgttttagagctaccatagcggtactatcggcatctttttttttcagccaactccaattttttttagatgccgatagtaccgctatgg

SEQ ID NO: 1019 - DNA, 101 bp, synthetic construct
  source 1..101: mol_type = other DNA
gtgatagttagcaagttttagagctaccatagcggtactatcggcatctttttttttcagccaactccaattttttttagatgccgatagtaccgctatgg

SEQ ID NO: 1020 - DNA, 102 bp, synthetic construct
  source 1..102: mol_type = other DNA
gtgaaaaagaactccgttttagagctaccatagcggtactatcggcatctttttttttcagccaactccaattttttttagatgccgatagtaccgctatgg

SEQ ID NO: 1021 - DNA, 102 bp, synthetic construct
  source 1..102: mol_type = other DNA
gataagctcaaaagcgttttagagctaccatagcggtactatcggcatctttttttttcagccaactccaattttttttagatgccgatagtaccgctatgg

SEQ ID NO: 1022 - DNA, 102 bp, synthetic construct
  source 1..102: mol_type = other DNA
gagttggagttactagttttagagctaccatagcggtactatcggcatctttttttttcagccaactccaattttttttagatgccgatagtaccgctatgg

SEQ ID NO: 1023 - DNA, 102 bp, synthetic construct
  source 1..102: mol_type = other DNA
gttcaaggacatgaagttttagagctaccatagcggtactatcggcatctttttttttcagccaactccaattttttttagatgccgatagtaccgctatgg

SEQ ID NO: 1024 - DNA, 102 bp, synthetic construct
  source 1..102: mol_type = other DNA
gaactacactcagttgttttagagctaccatagcggtactatcggcatctttttttttcagccaactccaattttttttagatgccgatagtaccgctatgg

SEQ ID NO: 1025 - DNA, 101 bp, synthetic construct
  source 1..101: mol_type = other DNA
gggttccacgccttgttttagagctaccatagcggtactatcggcatctttttttttcagccaactccaattttttttagatgccgatagtaccgctatgg

SEQ ID NO: 1026 - DNA, 101 bp, synthetic construct
  source 1..101: mol_type = other DNA
gtttgttctacctagttttagagctaccatagcggtactatcggcatctttttttttcagccaactccaattttttttagatgccgatagtaccgctatgg

SEQ ID NO: 1027 - DNA, 101 bp, synthetic construct
  source 1..101: mol_type = other DNA
gagcaaaacaatttgttttagagctaccatagcggtactatcggcatctttttttttcagccaactccaattttttttagatgccgatagtaccgctatgg

SEQ ID NO: 1028 - DNA, 102 bp, synthetic construct
  source 1..102: mol_type = other DNA
gtaaatgtgcctgacgttttagagctaccatagcggtactatcggcatctttttttttcagccaactccaattttttttagatgccgatagtaccgctatgg

SEQ ID NO: 1029 - DNA, 102 bp, synthetic construct
  source 1..102: mol_type = other DNA
gtgatgttgcacgacgttttagagctaccatagcggtactatcggcatctttttttttcagccaactccaattttttttagatgccgatagtaccgctatgg

SEQ ID NO: 1030 - DNA, 102 bp, synthetic construct
  source 1..102: mol_type = other DNA
gtgaagcaactactagttttagagctaccatagcggtactatcggcatctttttttttcagccaactccaattttttttagatgccgatagtaccgctatgg

SEQ ID NO: 1031 - DNA, 102 bp, synthetic construct
  source 1..102: mol_type = other DNA
gatcggcgagaccaggttttagagctaccatagcggtactatcggcatctttttttttcagccaactccaattttttttagatgccgatagtaccgctatgg

SEQ ID NO: 1032 - DNA, 102 bp, synthetic construct
  source 1..102: mol_type = other DNA
gtgagacaagaggcggttttagagctaccatagcggtactatcggcatctttttttttcagccaactccaattttttttagatgccgatagtaccgctatgg

SEQ ID NO: 1033 - DNA, 102 bp, synthetic construct
  source 1..102: mol_type = other DNA
gccaaatgcaaggatgttttagagctacctcgtactagtctcgcatgaccttttttttcagccaactccaattttttttggtcatgcgagactagtacgagg

SEQ ID NO: 1034 - DNA, 102 bp, synthetic construct
  source 1..102: mol_type = other DNA
gccaatccttgcattgttttagagctacctcgtactagtctcgcatgaccttttttttcagccaactccaattttttttggtcatgcgagactagtacgagg

SEQ ID NO: 1035 - DNA, 101 bp, synthetic construct
  source 1..101: mol_type = other DNA
gtgatagttagcaagttttagagctacctcgtactagtctcgcatgaccttttttttcagccaactccaattttttttggtcatgcgagactagtacgagg

SEQ ID NO: 1036 - DNA, 102 bp, synthetic construct
  source 1..102: mol_type = other DNA
gtgaaaaagaactccgttttagagctacctcgtactagtctcgcatgaccttttttttcagccaactccaattttttttggtcatgcgagactagtacgagg

SEQ ID NO: 1037 - DNA, 102 bp, synthetic construct
  source 1..102: mol_type = other DNA
gataagctcaaaagcgttttagagctacctcgtactagtctcgcatgaccttttttttcagccaactccaattttttttggtcatgcgagactagtacgagg

SEQ ID NO: 1038 - DNA, 102 bp, synthetic construct
  source 1..102: mol_type = other DNA
gagttggagttactagttttagagctacctcgtactagtctcgcatgaccttttttttcagccaactccaattttttttggtcatgcgagactagtacgagg

SEQ ID NO: 1039 - DNA, 102 bp, synthetic construct
  source 1..102: mol_type = other DNA
gttcaaggacatgaagttttagagctacctcgtactagtctcgcatgaccttttttttcagccaactccaattttttttggtcatgcgagactagtacgagg

SEQ ID NO: 1040 - DNA, 102 bp, synthetic construct
  source 1..102: mol_type = other DNA
gaactacactcagttgttttagagctacctcgtactagtctcgcatgaccttttttttcagccaactccaattttttttggtcatgcgagactagtacgagg

SEQ ID NO: 1041 - DNA, 101 bp, synthetic construct
  source 1..101: mol_type = other DNA
gggttccacgccttgttttagagctacctcgtactagtctcgcatgaccttttttttcagccaactccaattttttttggtcatgcgagactagtacgagg

SEQ ID NO: 1042 - DNA, 101 bp, synthetic construct
  source 1..101: mol_type = other DNA
gtttgttctacctagttttagagctacctcgtactagtctcgcatgaccttttttttcagccaactccaattttttttggtcatgcgagactagtacgagg

SEQ ID NO: 1043 - DNA, 101 bp, synthetic construct
  source 1..101: mol_type = other DNA
gagcaaaacaatttgttttagagctacctcgtactagtctcgcatgaccttttttttcagccaactccaattttttttggtcatgcgagactagtacgagg

SEQ ID NO: 1044 - DNA, 102 bp, synthetic construct
  source 1..102: mol_type = other DNA
gtaaatgtgcctgacgttttagagctacctcgtactagtctcgcatgaccttttttttcagccaactccaattttttttggtcatgcgagactagtacgagg

SEQ ID NO: 1045 - DNA, 102 bp, synthetic construct
  source 1..102: mol_type = other DNA
gtgatgttgcacgacgttttagagctacctcgtactagtctcgcatgaccttttttttcagccaactccaattttttttggtcatgcgagactagtacgagg

SEQ ID NO: 1046 - DNA, 102 bp, synthetic construct
  source 1..102: mol_type = other DNA
gtgaagcaactactagttttagagctacctcgtactagtctcgcatgaccttttttttcagccaactccaattttttttggtcatgcgagactagtacgagg

SEQ ID NO: 1047 - DNA, 102 bp, synthetic construct
  source 1..102: mol_type = other DNA
gatcggcgagaccaggttttagagctacctcgtactagtctcgcatgaccttttttttcagccaactccaattttttttggtcatgcgagactagtacgagg

SEQ ID NO: 1048 - DNA, 102 bp, synthetic construct
  source 1..102: mol_type = other DNA
gtgagacaagaggcggttttagagctacctcgtactagtctcgcatgaccttttttttcagccaactccaattttttttggtcatgcgagactagtacgagg

SEQ ID NO: 1049 - DNA, 102 bp, synthetic construct
  source 1..102: mol_type = other DNA
gccaaatgcaaggatgttttagagctaccgatagtgctaaacgacgctttttttttttcagccaactccaattttttttaaagcgtcgtttagcactatcgg

SEQ ID NO: 1050 - DNA, 102 bp, synthetic construct
  source 1..102: mol_type = other DNA
gccaatccttgcattgttttagagctaccgatagtgctaaacgacgctttttttttttcagccaactccaattttttttaaagcgtcgtttagcactatcgg

SEQ ID NO: 1051 - DNA, 101 bp, synthetic construct
  source 1..101: mol_type = other DNA
gtgatagttagcaagttttagagctaccgatagtgctaaacgacgctttttttttttcagccaactccaattttttttaaagcgtcgtttagcactatcgg

SEQ ID NO: 1052 - DNA, 102 bp, synthetic construct
  source 1..102: mol_type = other DNA
gtgaaaaagaactccgttttagagctaccgatagtgctaaacgacgctttttttttttcagccaactccaattttttttaaagcgtcgtttagcactatcgg

SEQ ID NO: 1053 - DNA, 102 bp, synthetic construct
  source 1..102: mol_type = other DNA
gataagctcaaaagcgttttagagctaccgatagtgctaaacgacgctttttttttttcagccaactccaattttttttaaagcgtcgtttagcactatcgg

SEQ ID NO: 1054 - DNA, 102 bp, synthetic construct
  source 1..102: mol_type = other DNA
gagttggagttactagttttagagctaccgatagtgctaaacgacgctttttttttttcagccaactccaattttttttaaagcgtcgtttagcactatcgg

SEQ ID NO: 1055 - DNA, 102 bp, synthetic construct
  source 1..102: mol_type = other DNA
gttcaaggacatgaagttttagagctaccgatagtgctaaacgacgctttttttttttcagccaactccaattttttttaaagcgtcgtttagcactatcgg

SEQ ID NO: 1056 - DNA, 102 bp, synthetic construct
  source 1..102: mol_type = other DNA
gaactacactcagttgttttagagctaccgatagtgctaaacgacgctttttttttttcagccaactccaattttttttaaagcgtcgtttagcactatcgg

SEQ ID NO: 1057 - DNA, 101 bp, synthetic construct
  source 1..101: mol_type = other DNA
gggttccacgccttgttttagagctaccgatagtgctaaacgacgctttttttttttcagccaactccaattttttttaaagcgtcgtttagcactatcgg

SEQ ID NO: 1058 - DNA, 101 bp, synthetic construct
  source 1..101: mol_type = other DNA
gtttgttctacctagttttagagctaccgatagtgctaaacgacgctttttttttttcagccaactccaattttttttaaagcgtcgtttagcactatcgg

SEQ ID NO: 1059 - DNA, 101 bp, synthetic construct
  source 1..101: mol_type = other DNA
gagcaaaacaatttgttttagagctaccgatagtgctaaacgacgctttttttttttcagccaactccaattttttttaaagcgtcgtttagcactatcgg

SEQ ID NO: 1060 - DNA, 102 bp, synthetic construct
  source 1..102: mol_type = other DNA
gtaaatgtgcctgacgttttagagctaccgatagtgctaaacgacgctttttttttttcagccaactccaattttttttaaagcgtcgtttagcactatcgg

SEQ ID NO: 1061 - DNA, 102 bp, synthetic construct
  source 1..102: mol_type = other DNA
gtgatgttgcacgacgttttagagctaccgatagtgctaaacgacgctttttttttttcagccaactccaattttttttaaagcgtcgtttagcactatcgg

SEQ ID NO: 1062 - DNA, 102 bp, synthetic construct
  source 1..102: mol_type = other DNA
gtgaagcaactactagttttagagctaccgatagtgctaaacgacgctttttttttttcagccaactccaattttttttaaagcgtcgtttagcactatcgg

SEQ ID NO: 1063 - DNA, 102 bp, synthetic construct
  source 1..102: mol_type = other DNA
gatcggcgagaccaggttttagagctaccgatagtgctaaacgacgctttttttttttcagccaactccaattttttttaaagcgtcgtttagcactatcgg

SEQ ID NO: 1064 - DNA, 102 bp, synthetic construct
  source 1..102: mol_type = other DNA
gtgagacaagaggcggttttagagctaccgatagtgctaaacgacgctttttttttttcagccaactccaattttttttaaagcgtcgtttagcactatcgg

SEQ ID NO: 1065 - DNA, 102 bp, synthetic construct
  source 1..102: mol_type = other DNA
gccaaatgcaaggatgttttagagctacccgttatcgacgttcaaggaacttttttttcagccaactccaattttttttgttccttgaacgtcgataacggg

SEQ ID NO: 1066 - DNA, 102 bp, synthetic construct
  source 1..102: mol_type = other DNA
gccaatccttgcattgttttagagctacccgttatcgacgttcaaggaacttttttttcagccaactccaattttttttgttccttgaacgtcgataacggg

SEQ ID NO: 1067 - DNA, 101 bp, synthetic construct
  source 1..101: mol_type = other DNA
gtgatagttagcaagttttagagctacccgttatcgacgttcaaggaacttttttttcagccaactccaattttttttgttccttgaacgtcgataacggg

SEQ ID NO: 1068 - DNA, 102 bp, synthetic construct
  source 1..102: mol_type = other DNA
gtgaaaaagaactccgttttagagctacccgttatcgacgttcaaggaacttttttttcagccaactccaattttttttgttccttgaacgtcgataacggg

SEQ ID NO: 1069 - DNA, 102 bp, synthetic construct
  source 1..102: mol_type = other DNA
gataagctcaaaagcgttttagagctacccgttatcgacgttcaaggaacttttttttcagccaactccaattttttttgttccttgaacgtcgataacggg

SEQ ID NO: 1070 - DNA, 102 bp, synthetic construct
  source 1..102: mol_type = other DNA
gagttggagttactagttttagagctacccgttatcgacgttcaaggaacttttttttcagccaactccaattttttttgttccttgaacgtcgataacggg

SEQ ID NO: 1071 - DNA, 102 bp, synthetic construct
  source 1..102: mol_type = other DNA
gttcaaggacatgaagttttagagctacccgttatcgacgttcaaggaacttttttttcagccaactccaattttttttgttccttgaacgtcgataacggg

SEQ ID NO: 1072 - DNA, 102 bp, synthetic construct
  source 1..102: mol_type = other DNA
gaactacactcagttgttttagagctacccgttatcgacgttcaaggaacttttttttcagccaactccaattttttttgttccttgaacgtcgataacggg

SEQ ID NO: 1073 - DNA, 101 bp, synthetic construct
  source 1..101: mol_type = other DNA
gggttccacgccttgttttagagctacccgttatcgacgttcaaggaacttttttttcagccaactccaattttttttgttccttgaacgtcgataacggg

SEQ ID NO: 1074 - DNA, 101 bp, synthetic construct
  source 1..101: mol_type = other DNA
gtttgttctacctagttttagagctacccgttatcgacgttcaaggaacttttttttcagccaactccaattttttttgttccttgaacgtcgataacggg

SEQ ID NO: 1075 - DNA, 101 bp, synthetic construct
  source 1..101: mol_type = other DNA
gagcaaaacaatttgttttagagctacccgttatcgacgttcaaggaacttttttttcagccaactccaattttttttgttccttgaacgtcgataacggg

SEQ ID NO: 1076 - DNA, 102 bp, synthetic construct
  source 1..102: mol_type = other DNA
gtaaatgtgcctgacgttttagagctacccgttatcgacgttcaaggaacttttttttcagccaactccaattttttttgttccttgaacgtcgataacggg

SEQ ID NO: 1077 - DNA, 102 bp, synthetic construct
  source 1..102: mol_type = other DNA
gtgatgttgcacgacgttttagagctacccgttatcgacgttcaaggaacttttttttcagccaactccaattttttttgttccttgaacgtcgataacggg

SEQ ID NO: 1078 - DNA, 102 bp, synthetic construct
  source 1..102: mol_type = other DNA
gtgaagcaactactagttttagagctacccgttatcgacgttcaaggaacttttttttcagccaactccaattttttttgttccttgaacgtcgataacggg

SEQ ID NO: 1079 - DNA, 102 bp, synthetic construct
  source 1..102: mol_type = other DNA
gatcggcgagaccaggttttagagctacccgttatcgacgttcaaggaacttttttttcagccaactccaattttttttgttccttgaacgtcgataacggg

SEQ ID NO: 1080 - DNA, 102 bp, synthetic construct
  source 1..102: mol_type = other DNA
gtgagacaagaggcggttttagagctacccgttatcgacgttcaaggaacttttttttcagccaactccaattttttttgttccttgaacgtcgataacggg

SEQ ID NO: 1081 - DNA, 102 bp, synthetic construct
  source 1..102: mol_type = other DNA
gccaaatgcaaggatgttttagagctaccgatcaatgcggtctgcgtaacttttttttcagccaactccaattttttttgttacgcagaccgcattgatcgg

SEQ ID NO: 1082 - DNA, 102 bp, synthetic construct
  source 1..102: mol_type = other DNA
gccaatccttgcattgttttagagctaccgatcaatgcggtctgcgtaacttttttttcagccaactccaattttttttgttacgcagaccgcattgatcgg

SEQ ID NO: 1083 - DNA, 101 bp, synthetic construct
  source 1..101: mol_type = other DNA
gtgatagttagcaagttttagagctaccgatcaatgcggtctgcgtaacttttttttcagccaactccaattttttttgttacgcagaccgcattgatcgg

SEQ ID NO: 1084 - DNA, 102 bp, synthetic construct
  source 1..102: mol_type = other DNA
gtgaaaaagaactccgttttagagctaccgatcaatgcggtctgcgtaacttttttttcagccaactccaattttttttgttacgcagaccgcattgatcgg

SEQ ID NO: 1085 - DNA, 102 bp, synthetic construct
  source 1..102: mol_type = other DNA
gataagctcaaaagcgttttagagctaccgatcaatgcggtctgcgtaacttttttttcagccaactccaattttttttgttacgcagaccgcattgatcgg

SEQ ID NO: 1086 - DNA, 102 bp, synthetic construct
  source 1..102: mol_type = other DNA
gagttggagttactagttttagagctaccgatcaatgcggtctgcgtaacttttttttcagccaactccaattttttttgttacgcagaccgcattgatcgg

SEQ ID NO: 1087 - DNA, 102 bp, synthetic construct
  source 1..102: mol_type = other DNA
gttcaaggacatgaagttttagagctaccgatcaatgcggtctgcgtaacttttttttcagccaactccaattttttttgttacgcagaccgcattgatcgg

SEQ ID NO: 1088 - DNA, 102 bp, synthetic construct
  source 1..102: mol_type = other DNA
gaactacactcagttgttttagagctaccgatcaatgcggtctgcgtaacttttttttcagccaactccaattttttttgttacgcagaccgcattgatcgg

SEQ ID NO: 1089 - DNA, 101 bp, synthetic construct
  source 1..101: mol_type = other DNA
gggttccacgccttgttttagagctaccgatcaatgcggtctgcgtaacttttttttcagccaactccaattttttttgttacgcagaccgcattgatcgg

SEQ ID NO: 1090 - DNA, 101 bp, synthetic construct
  source 1..101: mol_type = other DNA
gtttgttctacctagttttagagctaccgatcaatgcggtctgcgtaacttttttttcagccaactccaattttttttgttacgcagaccgcattgatcgg

SEQ ID NO: 1091 - DNA, 101 bp, synthetic construct
  source 1..101: mol_type = other DNA
gagcaaaacaatttgttttagagctaccgatcaatgcggtctgcgtaacttttttttcagccaactccaattttttttgttacgcagaccgcattgatcgg

SEQ ID NO: 1092 - DNA, 102 bp, synthetic construct
  source 1..102: mol_type = other DNA
gtaaatgtgcctgacgttttagagctaccgatcaatgcggtctgcgtaacttttttttcagccaactccaattttttttgttacgcagaccgcattgatcgg

SEQ ID NO: 1093 - DNA, 102 bp, synthetic construct
  source 1..102: mol_type = other DNA
gtgatgttgcacgacgttttagagctaccgatcaatgcggtctgcgtaacttttttttcagccaactccaattttttttgttacgcagaccgcattgatcgg

SEQ ID NO: 1094 - DNA, 102 bp, synthetic construct
  source 1..102: mol_type = other DNA
gtgaagcaactactagttttagagctaccgatcaatgcggtctgcgtaacttttttttcagccaactccaattttttttgttacgcagaccgcattgatcgg

SEQ ID NO: 1095 - DNA, 102 bp, synthetic construct
  source 1..102: mol_type = other DNA
gatcggcgagaccaggttttagagctaccgatcaatgcggtctgcgtaacttttttttcagccaactccaattttttttgttacgcagaccgcattgatcgg

SEQ ID NO: 1096 - DNA, 102 bp, synthetic construct
  source 1..102: mol_type = other DNA
gtgagacaagaggcggttttagagctaccgatcaatgcggtctgcgtaacttttttttcagccaactccaattttttttgttacgcagaccgcattgatcgg

SEQ ID NO: 1097 - DNA, 102 bp, synthetic construct
  source 1..102: mol_type = other DNA
gccaaatgcaaggatgttttagagctacccttactcgcgatactctcgacttttttttcagccaactccaattttttttgtcgagagtatcgcgagtaaggg

SEQ ID NO: 1098 - DNA, 102 bp, synthetic construct
  source 1..102: mol_type = other DNA
gccaatccttgcattgttttagagctacccttactcgcgatactctcgacttttttttcagccaactccaattttttttgtcgagagtatcgcgagtaaggg

SEQ ID NO: 1099 - DNA, 101 bp, synthetic construct
  source 1..101: mol_type = other DNA
gtgatagttagcaagttttagagctacccttactcgcgatactctcgacttttttttcagccaactccaattttttttgtcgagagtatcgcgagtaaggg

SEQ ID NO: 1100 - DNA, 102 bp, synthetic construct
  source 1..102: mol_type = other DNA
gtgaaaaagaactccgttttagagctacccttactcgcgatactctcgacttttttttcagccaactccaattttttttgtcgagagtatcgcgagtaaggg

SEQ ID NO: 1101 - DNA, 102 bp, synthetic construct
  source 1..102: mol_type = other DNA
gataagctcaaaagcgttttagagctacccttactcgcgatactctcgacttttttttcagccaactccaattttttttgtcgagagtatcgcgagtaaggg

SEQ ID NO: 1102 - DNA, 102 bp, synthetic construct
  source 1..102: mol_type = other DNA
gagttggagttactagttttagagctacccttactcgcgatactctcgacttttttttcagccaactccaattttttttgtcgagagtatcgcgagtaaggg

SEQ ID NO: 1103 - DNA, 102 bp, synthetic construct
  source 1..102: mol_type = other DNA
gttcaaggacatgaagttttagagctacccttactcgcgatactctcgacttttttttcagccaactccaattttttttgtcgagagtatcgcgagtaaggg

SEQ ID NO: 1104 - DNA, 102 bp, synthetic construct
  source 1..102: mol_type = other DNA
gaactacactcagttgttttagagctacccttactcgcgatactctcgacttttttttcagccaactccaattttttttgtcgagagtatcgcgagtaaggg

SEQ ID NO: 1105 - DNA, 101 bp, synthetic construct
  source 1..101: mol_type = other DNA
gggttccacgccttgttttagagctacccttactcgcgatactctcgacttttttttcagccaactccaattttttttgtcgagagtatcgcgagtaaggg

SEQ ID NO: 1106 - DNA, 101 bp, synthetic construct
  source 1..101: mol_type = other DNA
gtttgttctacctagttttagagctacccttactcgcgatactctcgacttttttttcagccaactccaattttttttgtcgagagtatcgcgagtaaggg

SEQ ID NO: 1107 - DNA, 101 bp, synthetic construct
  source 1..101: mol_type = other DNA
gagcaaaacaatttgttttagagctacccttactcgcgatactctcgacttttttttcagccaactccaattttttttgtcgagagtatcgcgagtaaggg

SEQ ID NO: 1108 - DNA, 102 bp, synthetic construct
  source 1..102: mol_type = other DNA
gtaaatgtgcctgacgttttagagctacccttactcgcgatactctcgacttttttttcagccaactccaattttttttgtcgagagtatcgcgagtaaggg

SEQ ID NO: 1109 - DNA, 102 bp, synthetic construct
  source 1..102: mol_type = other DNA
gtgatgttgcacgacgttttagagctacccttactcgcgatactctcgacttttttttcagccaactccaattttttttgtcgagagtatcgcgagtaaggg

SEQ ID NO: 1110 - DNA, 102 bp, synthetic construct
  source 1..102: mol_type = other DNA
gtgaagcaactactagttttagagctacccttactcgcgatactctcgacttttttttcagccaactccaattttttttgtcgagagtatcgcgagtaaggg

SEQ ID NO: 1111 - DNA, 102 bp, synthetic construct
  source 1..102: mol_type = other DNA
gatcggcgagaccaggttttagagctacccttactcgcgatactctcgacttttttttcagccaactccaattttttttgtcgagagtatcgcgagtaaggg

SEQ ID NO: 1112 - DNA, 102 bp, synthetic construct
  source 1..102: mol_type = other DNA
gtgagacaagaggcggttttagagctacccttactcgcgatactctcgacttttttttcagccaactccaattttttttgtcgagagtatcgcgagtaaggg

SEQ ID NO: 1113 - DNA, 102 bp, synthetic construct
  source 1..102: mol_type = other DNA
gccaaatgcaaggatgttttagagctaccgcggacggtaagcacggaatattttttttcagccaactccaatttttttttattccgtgcttaccgtccgcgg

SEQ ID NO: 1114 - DNA, 102 bp, synthetic construct
  source 1..102: mol_type = other DNA
gccaatccttgcattgttttagagctaccgcggacggtaagcacggaatattttttttcagccaactccaatttttttttattccgtgcttaccgtccgcgg

SEQ ID NO: 1115 - DNA, 101 bp, synthetic construct
  source 1..101: mol_type = other DNA
gtgatagttagcaagttttagagctaccgcggacggtaagcacggaatattttttttcagccaactccaatttttttttattccgtgcttaccgtccgcgg

SEQ ID NO: 1116 - DNA, 102 bp, synthetic construct
  source 1..102: mol_type = other DNA
gtgaaaaagaactccgttttagagctaccgcggacggtaagcacggaatattttttttcagccaactccaatttttttttattccgtgcttaccgtccgcgg

SEQ ID NO: 1117 - DNA, 102 bp, synthetic construct
  source 1..102: mol_type = other DNA
gataagctcaaaagcgttttagagctaccgcggacggtaagcacggaatattttttttcagccaactccaatttttttttattccgtgcttaccgtccgcgg

SEQ ID NO: 1118 - DNA, 102 bp, synthetic construct
  source 1..102: mol_type = other DNA
gagttggagttactagttttagagctaccgcggacggtaagcacggaatattttttttcagccaactccaatttttttttattccgtgcttaccgtccgcgg

SEQ ID NO: 1119 - DNA, 102 bp, synthetic construct
  source 1..102: mol_type = other DNA
gttcaaggacatgaagttttagagctaccgcggacggtaagcacggaatattttttttcagccaactccaatttttttttattccgtgcttaccgtccgcgg

SEQ ID NO: 1120 - DNA, 102 bp, synthetic construct
  source 1..102: mol_type = other DNA
gaactacactcagttgttttagagctaccgcggacggtaagcacggaatattttttttcagccaactccaatttttttttattccgtgcttaccgtccgcgg

SEQ ID NO: 1121 - DNA, 101 bp, synthetic construct
  source 1..101: mol_type = other DNA
gggttccacgccttgttttagagctaccgcggacggtaagcacggaatattttttttcagccaactccaatttttttttattccgtgcttaccgtccgcgg

SEQ ID NO: 1122 - DNA, 101 bp, synthetic construct
  source 1..101: mol_type = other DNA
gtttgttctacctagttttagagctaccgcggacggtaagcacggaatattttttttcagccaactccaatttttttttattccgtgcttaccgtccgcgg

SEQ ID NO: 1123 - DNA, 101 bp, synthetic construct
  source 1..101: mol_type = other DNA
gagcaaaacaatttgttttagagctaccgcggacggtaagcacggaatattttttttcagccaactccaatttttttttattccgtgcttaccgtccgcgg

SEQ ID NO: 1124 - DNA, 102 bp, synthetic construct
  source 1..102: mol_type = other DNA
gtaaatgtgcctgacgttttagagctaccgcggacggtaagcacggaatattttttttcagccaactccaatttttttttattccgtgcttaccgtccgcgg

SEQ ID NO: 1125 - DNA, 102 bp, synthetic construct
  source 1..102: mol_type = other DNA
gtgatgttgcacgacgttttagagctaccgcggacggtaagcacggaatattttttttcagccaactccaatttttttttattccgtgcttaccgtccgcgg

SEQ ID NO: 1126 - DNA, 102 bp, synthetic construct
  source 1..102: mol_type = other DNA
gtgaagcaactactagttttagagctaccgcggacggtaagcacggaatattttttttcagccaactccaatttttttttattccgtgcttaccgtccgcgg

SEQ ID NO: 1127 - DNA, 102 bp, synthetic construct
  source 1..102: mol_type = other DNA
gatcggcgagaccaggttttagagctaccgcggacggtaagcacggaatattttttttcagccaactccaatttttttttattccgtgcttaccgtccgcgg

SEQ ID NO: 1128 - DNA, 102 bp, synthetic construct
  source 1..102: mol_type = other DNA
gtgagacaagaggcggttttagagctaccgcggacggtaagcacggaatattttttttcagccaactccaatttttttttattccgtgcttaccgtccgcgg

SEQ ID NO: 1129 - DNA, 102 bp, synthetic construct
  source 1..102: mol_type = other DNA
gccaaatgcaaggatgttttagagctacctatagtcacgaatcgtagggtttttttttcagccaactccaattttttttaccctacgattcgtgactatagg

SEQ ID NO: 1130 - DNA, 102 bp, synthetic construct
  source 1..102: mol_type = other DNA
gccaatccttgcattgttttagagctacctatagtcacgaatcgtagggtttttttttcagccaactccaattttttttaccctacgattcgtgactatagg

SEQ ID NO: 1131 - DNA, 101 bp, synthetic construct
  source 1..101: mol_type = other DNA
gtgatagttagcaagttttagagctacctatagtcacgaatcgtagggtttttttttcagccaactccaattttttttaccctacgattcgtgactatagg

SEQ ID NO: 1132 - DNA, 102 bp, synthetic construct
  source 1..102: mol_type = other DNA
gtgaaaaagaactccgttttagagctacctatagtcacgaatcgtagggtttttttttcagccaactccaattttttttaccctacgattcgtgactatagg

SEQ ID NO: 1133 - DNA, 102 bp, synthetic construct
  source 1..102: mol_type = other DNA
gataagctcaaaagcgttttagagctacctatagtcacgaatcgtagggtttttttttcagccaactccaattttttttaccctacgattcgtgactatagg

SEQ ID NO: 1134 - DNA, 102 bp, synthetic construct
  source 1..102: mol_type = other DNA
gagttggagttactagttttagagctacctatagtcacgaatcgtagggtttttttttcagccaactccaattttttttaccctacgattcgtgactatagg

SEQ ID NO: 1135 - DNA, 102 bp, synthetic construct
  source 1..102: mol_type = other DNA
gttcaaggacatgaagttttagagctacctatagtcacgaatcgtagggtttttttttcagccaactccaattttttttaccctacgattcgtgactatagg

SEQ ID NO: 1136 - DNA, 102 bp, synthetic construct
  source 1..102: mol_type = other DNA
gaactacactcagttgttttagagctacctatagtcacgaatcgtagggtttttttttcagccaactccaattttttttaccctacgattcgtgactatagg

SEQ ID NO: 1137 - DNA, 101 bp, synthetic construct
  source 1..101: mol_type = other DNA
gggttccacgccttgttttagagctacctatagtcacgaatcgtagggtttttttttcagccaactccaattttttttaccctacgattcgtgactatagg

SEQ ID NO: 1138 - DNA, 101 bp, synthetic construct
  source 1..101: mol_type = other DNA
gtttgttctacctagttttagagctacctatagtcacgaatcgtagggtttttttttcagccaactccaattttttttaccctacgattcgtgactatagg

SEQ ID NO: 1139 - DNA, 101 bp, synthetic construct
  source 1..101: mol_type = other DNA
gagcaaaacaatttgttttagagctacctatagtcacgaatcgtagggtttttttttcagccaactccaattttttttaccctacgattcgtgactatagg

SEQ ID NO: 1140 - DNA, 102 bp, synthetic construct
  source 1..102: mol_type = other DNA
gtaaatgtgcctgacgttttagagctacctatagtcacgaatcgtagggtttttttttcagccaactccaattttttttaccctacgattcgtgactatagg

SEQ ID NO: 1141 - DNA, 102 bp, synthetic construct
  source 1..102: mol_type = other DNA
gtgatgttgcacgacgttttagagctacctatagtcacgaatcgtagggtttttttttcagccaactccaattttttttaccctacgattcgtgactatagg

SEQ ID NO: 1142 - DNA, 102 bp, synthetic construct
  source 1..102: mol_type = other DNA
gtgaagcaactactagttttagagctacctatagtcacgaatcgtagggtttttttttcagccaactccaattttttttaccctacgattcgtgactatagg

SEQ ID NO: 1143 - DNA, 102 bp, synthetic construct
  source 1..102: mol_type = other DNA
gatcggcgagaccaggttttagagctacctatagtcacgaatcgtagggtttttttttcagccaactccaattttttttaccctacgattcgtgactatagg

SEQ ID NO: 1144 - DNA, 102 bp, synthetic construct
  source 1..102: mol_type = other DNA
gtgagacaagaggcggttttagagctacctatagtcacgaatcgtagggtttttttttcagccaactccaattttttttaccctacgattcgtgactatagg

SEQ ID NO: 1145 - DNA, 102 bp, synthetic construct
  source 1..102: mol_type = other DNA
gccaaatgcaaggatgttttagagctacccgtcgtcacgtatgcgtagcattttttttcagccaactccaatttttttttgctacgcatacgtgacgacggg

SEQ ID NO: 1146 - DNA, 102 bp, synthetic construct
  source 1..102: mol_type = other DNA
gccaatccttgcattgttttagagctacccgtcgtcacgtatgcgtagcattttttttcagccaactccaatttttttttgctacgcatacgtgacgacggg

SEQ ID NO: 1147 - DNA, 101 bp, synthetic construct
  source 1..101: mol_type = other DNA
gtgatagttagcaagttttagagctacccgtcgtcacgtatgcgtagcattttttttcagccaactccaatttttttttgctacgcatacgtgacgacggg

SEQ ID NO: 1148 - DNA, 102 bp, synthetic construct
  source 1..102: mol_type = other DNA
gtgaaaaagaactccgttttagagctacccgtcgtcacgtatgcgtagcattttttttcagccaactccaatttttttttgctacgcatacgtgacgacggg

SEQ ID NO: 1149 - DNA, 102 bp, synthetic construct
  source 1..102: mol_type = other DNA
gataagctcaaaagcgttttagagctacccgtcgtcacgtatgcgtagcattttttttcagccaactccaatttttttttgctacgcatacgtgacgacggg

SEQ ID NO: 1150 - DNA, 102 bp, synthetic construct
  source 1..102: mol_type = other DNA
gagttggagttactagttttagagctacccgtcgtcacgtatgcgtagcattttttttcagccaactccaatttttttttgctacgcatacgtgacgacggg

SEQ ID NO: 1151 - DNA, 102 bp, synthetic construct
  source 1..102: mol_type = other DNA
gttcaaggacatgaagttttagagctacccgtcgtcacgtatgcgtagcattttttttcagccaactccaatttttttttgctacgcatacgtgacgacggg

SEQ ID NO: 1152 - DNA, 102 bp, synthetic construct
  source 1..102: mol_type = other DNA
gaactacactcagttgttttagagctacccgtcgtcacgtatgcgtagcattttttttcagccaactccaatttttttttgctacgcatacgtgacgacggg

SEQ ID NO: 1153 - DNA, 101 bp, synthetic construct
  source 1..101: mol_type = other DNA
gggttccacgccttgttttagagctacccgtcgtcacgtatgcgtagcattttttttcagccaactccaatttttttttgctacgcatacgtgacgacggg

SEQ ID NO: 1154 - DNA, 101 bp, synthetic construct
  source 1..101: mol_type = other DNA
gtttgttctacctagttttagagctacccgtcgtcacgtatgcgtagcattttttttcagccaactccaatttttttttgctacgcatacgtgacgacggg

SEQ ID NO: 1155 - DNA, 101 bp, synthetic construct
  source 1..101: mol_type = other DNA
gagcaaaacaatttgttttagagctacccgtcgtcacgtatgcgtagcattttttttcagccaactccaatttttttttgctacgcatacgtgacgacggg

SEQ ID NO: 1156 - DNA, 102 bp, synthetic construct
  source 1..102: mol_type = other DNA
gtaaatgtgcctgacgttttagagctacccgtcgtcacgtatgcgtagcattttttttcagccaactccaatttttttttgctacgcatacgtgacgacggg

SEQ ID NO: 1157 - DNA, 102 bp, synthetic construct
  source 1..102: mol_type = other DNA
gtgatgttgcacgacgttttagagctacccgtcgtcacgtatgcgtagcattttttttcagccaactccaatttttttttgctacgcatacgtgacgacggg

SEQ ID NO: 1158 - DNA, 102 bp, synthetic construct
  source 1..102: mol_type = other DNA
gtgaagcaactactagttttagagctacccgtcgtcacgtatgcgtagcattttttttcagccaactccaatttttttttgctacgcatacgtgacgacggg

SEQ ID NO: 1159 - DNA, 102 bp, synthetic construct
  source 1..102: mol_type = other DNA
gatcggcgagaccaggttttagagctacccgtcgtcacgtatgcgtagcattttttttcagccaactccaatttttttttgctacgcatacgtgacgacggg

SEQ ID NO: 1160 - DNA, 102 bp, synthetic construct
  source 1..102: mol_type = other DNA
gtgagacaagaggcggttttagagctacccgtcgtcacgtatgcgtagcattttttttcagccaactccaatttttttttgctacgcatacgtgacgacggg

SEQ ID NO: 1161 - DNA, 102 bp, synthetic construct
  source 1..102: mol_type = other DNA
gccaaatgcaaggatgttttagagctacccgagaggtagtagacgacgcattttttttcagccaactccaatttttttttgcgtcgtctactacctctcggg

SEQ ID NO: 1162 - DNA, 102 bp, synthetic construct
  source 1..102: mol_type = other DNA
gccaatccttgcattgttttagagctacccgagaggtagtagacgacgcattttttttcagccaactccaatttttttttgcgtcgtctactacctctcggg

SEQ ID NO: 1163 - DNA, 101 bp, synthetic construct
  source 1..101: mol_type = other DNA
gtgatagttagcaagttttagagctacccgagaggtagtagacgacgcattttttttcagccaactccaatttttttttgcgtcgtctactacctctcggg

SEQ ID NO: 1164 - DNA, 102 bp, synthetic construct
  source 1..102: mol_type = other DNA
gtgaaaaagaactccgttttagagctacccgagaggtagtagacgacgcattttttttcagccaactccaatttttttttgcgtcgtctactacctctcggg

SEQ ID NO: 1165 - DNA, 102 bp, synthetic construct
  source 1..102: mol_type = other DNA
gataagctcaaaagcgttttagagctacccgagaggtagtagacgacgcattttttttcagccaactccaatttttttttgcgtcgtctactacctctcggg

SEQ ID NO: 1166 - DNA, 102 bp, synthetic construct
  source 1..102: mol_type = other DNA
gagttggagttactagttttagagctacccgagaggtagtagacgacgcattttttttcagccaactccaatttttttttgcgtcgtctactacctctcggg

SEQ ID NO: 1167 - DNA, 102 bp, synthetic construct
  source 1..102: mol_type = other DNA
gttcaaggacatgaagttttagagctacccgagaggtagtagacgacgcattttttttcagccaactccaatttttttttgcgtcgtctactacctctcggg

SEQ ID NO: 1168 - DNA, 102 bp, synthetic construct
  source 1..102: mol_type = other DNA
gaactacactcagttgttttagagctacccgagaggtagtagacgacgcattttttttcagccaactccaatttttttttgcgtcgtctactacctctcggg

SEQ ID NO: 1169 - DNA, 101 bp, synthetic construct
  source 1..101: mol_type = other DNA
gggttccacgccttgttttagagctacccgagaggtagtagacgacgcattttttttcagccaactccaatttttttttgcgtcgtctactacctctcggg

SEQ ID NO: 1170 - DNA, 101 bp, synthetic construct
  source 1..101: mol_type = other DNA
gtttgttctacctagttttagagctacccgagaggtagtagacgacgcattttttttcagccaactccaatttttttttgcgtcgtctactacctctcggg

SEQ ID NO: 1171 - DNA, 101 bp, synthetic construct
  source 1..101: mol_type = other DNA
gagcaaaacaatttgttttagagctacccgagaggtagtagacgacgcattttttttcagccaactccaatttttttttgcgtcgtctactacctctcggg

SEQ ID NO: 1172 - DNA, 102 bp, synthetic construct
  source 1..102: mol_type = other DNA
gtaaatgtgcctgacgttttagagctacccgagaggtagtagacgacgcattttttttcagccaactccaatttttttttgcgtcgtctactacctctcggg

SEQ ID NO: 1173 - DNA, 102 bp, synthetic construct
  source 1..102: mol_type = other DNA
gtgatgttgcacgacgttttagagctacccgagaggtagtagacgacgcattttttttcagccaactccaatttttttttgcgtcgtctactacctctcggg

SEQ ID NO: 1174 - DNA, 102 bp, synthetic construct
  source 1..102: mol_type = other DNA
gtgaagcaactactagttttagagctacccgagaggtagtagacgacgcattttttttcagccaactccaatttttttttgcgtcgtctactacctctcggg

SEQ ID NO: 1175 - DNA, 102 bp, synthetic construct
  source 1..102: mol_type = other DNA
gatcggcgagaccaggttttagagctacccgagaggtagtagacgacgcattttttttcagccaactccaatttttttttgcgtcgtctactacctctcggg

SEQ ID NO: 1176 - DNA, 102 bp, synthetic construct
  source 1..102: mol_type = other DNA
gtgagacaagaggcggttttagagctacccgagaggtagtagacgacgcattttttttcagccaactccaatttttttttgcgtcgtctactacctctcggg

SEQ ID NO: 1177 - DNA, 102 bp, synthetic construct
  source 1..102: mol_type = other DNA
gccaaatgcaaggatgttttagagctaccgacgtctacggacgggagctattttttttcagccaactccaatttttttttagctcccgtccgtagacgtcgg

SEQ ID NO: 1178 - DNA, 102 bp, synthetic construct
  source 1..102: mol_type = other DNA
gccaatccttgcattgttttagagctaccgacgtctacggacgggagctattttttttcagccaactccaatttttttttagctcccgtccgtagacgtcgg

SEQ ID NO: 1179 - DNA, 101 bp, synthetic construct
  source 1..101: mol_type = other DNA
gtgatagttagcaagttttagagctaccgacgtctacggacgggagctattttttttcagccaactccaatttttttttagctcccgtccgtagacgtcgg

SEQ ID NO: 1180 - DNA, 102 bp, synthetic construct
  source 1..102: mol_type = other DNA
gtgaaaaagaactccgttttagagctaccgacgtctacggacgggagctattttttttcagccaactccaatttttttttagctcccgtccgtagacgtcgg

SEQ ID NO: 1181 - DNA, 102 bp, synthetic construct
  source 1..102: mol_type = other DNA
gataagctcaaaagcgttttagagctaccgacgtctacggacgggagctattttttttcagccaactccaatttttttttagctcccgtccgtagacgtcgg

SEQ ID NO: 1182 - DNA, 102 bp, synthetic construct
  source 1..102: mol_type = other DNA
gagttggagttactagttttagagctaccgacgtctacggacgggagctattttttttcagccaactccaatttttttttagctcccgtccgtagacgtcgg

SEQ ID NO: 1183 - DNA, 102 bp, synthetic construct
  source 1..102: mol_type = other DNA
gttcaaggacatgaagttttagagctaccgacgtctacggacgggagctattttttttcagccaactccaatttttttttagctcccgtccgtagacgtcgg

SEQ ID NO: 1184 - DNA, 102 bp, synthetic construct
  source 1..102: mol_type = other DNA
gaactacactcagttgttttagagctaccgacgtctacggacgggagctattttttttcagccaactccaatttttttttagctcccgtccgtagacgtcgg

SEQ ID NO: 1185 - DNA, 101 bp, synthetic construct
  source 1..101: mol_type = other DNA
gggttccacgccttgttttagagctaccgacgtctacggacgggagctattttttttcagccaactccaatttttttttagctcccgtccgtagacgtcgg

SEQ ID NO: 1186 - DNA, 101 bp, synthetic construct
  source 1..101: mol_type = other DNA
gtttgttctacctagttttagagctaccgacgtctacggacgggagctattttttttcagccaactccaatttttttttagctcccgtccgtagacgtcgg

SEQ ID NO: 1187 - DNA, 101 bp, synthetic construct
  source 1..101: mol_type = other DNA
gagcaaaacaatttgttttagagctaccgacgtctacggacgggagctattttttttcagccaactccaatttttttttagctcccgtccgtagacgtcgg

SEQ ID NO: 1188 - DNA, 102 bp, synthetic construct
  source 1..102: mol_type = other DNA
gtaaatgtgcctgacgttttagagctaccgacgtctacggacgggagctattttttttcagccaactccaatttttttttagctcccgtccgtagacgtcgg

SEQ ID NO: 1189 - DNA, 102 bp, synthetic construct
  source 1..102: mol_type = other DNA
gtgatgttgcacgacgttttagagctaccgacgtctacggacgggagctattttttttcagccaactccaatttttttttagctcccgtccgtagacgtcgg

SEQ ID NO: 1190 - DNA, 102 bp, synthetic construct
  source 1..102: mol_type = other DNA
gtgaagcaactactagttttagagctaccgacgtctacggacgggagctattttttttcagccaactccaatttttttttagctcccgtccgtagacgtcgg

SEQ ID NO: 1191 - DNA, 102 bp, synthetic construct
  source 1..102: mol_type = other DNA
gatcggcgagaccaggttttagagctaccgacgtctacggacgggagctattttttttcagccaactccaatttttttttagctcccgtccgtagacgtcgg

SEQ ID NO: 1192 - DNA, 102 bp, synthetic construct
  source 1..102: mol_type = other DNA
gtgagacaagaggcggttttagagctaccgacgtctacggacgggagctattttttttcagccaactccaatttttttttagctcccgtccgtagacgtcgg

SEQ ID NO: 1193 - DNA, 102 bp, synthetic construct
  source 1..102: mol_type = other DNA
gccaaatgcaaggatgttttagagctaccaaagctcattcgcgactgagcttttttttcagccaactccaattttttttgctcagtcgcgaatgagctttgg

SEQ ID NO: 1194 - DNA, 102 bp, synthetic construct
  source 1..102: mol_type = other DNA
gccaatccttgcattgttttagagctaccaaagctcattcgcgactgagcttttttttcagccaactccaattttttttgctcagtcgcgaatgagctttgg

SEQ ID NO: 1195 - DNA, 101 bp, synthetic construct
  source 1..101: mol_type = other DNA
gtgatagttagcaagttttagagctaccaaagctcattcgcgactgagcttttttttcagccaactccaattttttttgctcagtcgcgaatgagctttgg

SEQ ID NO: 1196 - DNA, 102 bp, synthetic construct
  source 1..102: mol_type = other DNA
gtgaaaaagaactccgttttagagctaccaaagctcattcgcgactgagcttttttttcagccaactccaattttttttgctcagtcgcgaatgagctttgg

SEQ ID NO: 1197 - DNA, 102 bp, synthetic construct
  source 1..102: mol_type = other DNA
gataagctcaaaagcgttttagagctaccaaagctcattcgcgactgagcttttttttcagccaactccaattttttttgctcagtcgcgaatgagctttgg

SEQ ID NO: 1198 - DNA, 102 bp, synthetic construct
  source 1..102: mol_type = other DNA
gagttggagttactagttttagagctaccaaagctcattcgcgactgagcttttttttcagccaactccaattttttttgctcagtcgcgaatgagctttgg

SEQ ID NO: 1199 - DNA, 102 bp, synthetic construct
  source 1..102: mol_type = other DNA
gttcaaggacatgaagttttagagctaccaaagctcattcgcgactgagcttttttttcagccaactccaattttttttgctcagtcgcgaatgagctttgg

SEQ ID NO: 1200 - DNA, 102 bp, synthetic construct
  source 1..102: mol_type = other DNA
gaactacactcagttgttttagagctaccaaagctcattcgcgactgagcttttttttcagccaactccaattttttttgctcagtcgcgaatgagctttgg

SEQ ID NO: 1201 - DNA, 101 bp, synthetic construct
  source 1..101: mol_type = other DNA
gggttccacgccttgttttagagctaccaaagctcattcgcgactgagcttttttttcagccaactccaattttttttgctcagtcgcgaatgagctttgg

SEQ ID NO: 1202 - DNA, 101 bp, synthetic construct
  source 1..101: mol_type = other DNA
gtttgttctacctagttttagagctaccaaagctcattcgcgactgagcttttttttcagccaactccaattttttttgctcagtcgcgaatgagctttgg

SEQ ID NO: 1203 - DNA, 101 bp, synthetic construct
  source 1..101: mol_type = other DNA
gagcaaaacaatttgttttagagctaccaaagctcattcgcgactgagcttttttttcagccaactccaattttttttgctcagtcgcgaatgagctttgg

SEQ ID NO: 1204 - DNA, 102 bp, synthetic construct
  source 1..102: mol_type = other DNA
gtaaatgtgcctgacgttttagagctaccaaagctcattcgcgactgagcttttttttcagccaactccaattttttttgctcagtcgcgaatgagctttgg

SEQ ID NO: 1205 - DNA, 102 bp, synthetic construct
  source 1..102: mol_type = other DNA
gtgatgttgcacgacgttttagagctaccaaagctcattcgcgactgagcttttttttcagccaactccaattttttttgctcagtcgcgaatgagctttgg

SEQ ID NO: 1206 - DNA, 102 bp, synthetic construct
  source 1..102: mol_type = other DNA
gtgaagcaactactagttttagagctaccaaagctcattcgcgactgagcttttttttcagccaactccaattttttttgctcagtcgcgaatgagctttgg

SEQ ID NO: 1207 - DNA, 102 bp, synthetic construct
  source 1..102: mol_type = other DNA
gatcggcgagaccaggttttagagctaccaaagctcattcgcgactgagcttttttttcagccaactccaattttttttgctcagtcgcgaatgagctttgg

SEQ ID NO: 1208 - DNA, 102 bp, synthetic construct
  source 1..102: mol_type = other DNA
gtgagacaagaggcggttttagagctaccaaagctcattcgcgactgagcttttttttcagccaactccaattttttttgctcagtcgcgaatgagctttgg

SEQ ID NO: 1209 - DNA, 102 bp, synthetic construct
  source 1..102: mol_type = other DNA
gccaaatgcaaggatgttttagagctaccatggcacgatcgacacggaggttttttttcagccaactccaattttttttcctccgtgtcgatcgtgccatgg

SEQ ID NO: 1210 - DNA, 102 bp, synthetic construct
  source 1..102: mol_type = other DNA
gccaatccttgcattgttttagagctaccatggcacgatcgacacggaggttttttttcagccaactccaattttttttcctccgtgtcgatcgtgccatgg

SEQ ID NO: 1211 - DNA, 101 bp, synthetic construct
  source 1..101: mol_type = other DNA
gtgatagttagcaagttttagagctaccatggcacgatcgacacggaggttttttttcagccaactccaattttttttcctccgtgtcgatcgtgccatgg

SEQ ID NO: 1212 - DNA, 102 bp, synthetic construct
  source 1..102: mol_type = other DNA
gtgaaaaagaactccgttttagagctaccatggcacgatcgacacggaggttttttttcagccaactccaattttttttcctccgtgtcgatcgtgccatgg

SEQ ID NO: 1213 - DNA, 102 bp, synthetic construct
  source 1..102: mol_type = other DNA
gataagctcaaaagcgttttagagctaccatggcacgatcgacacggaggttttttttcagccaactccaattttttttcctccgtgtcgatcgtgccatgg

SEQ ID NO: 1214 - DNA, 102 bp, synthetic construct
  source 1..102: mol_type = other DNA
gagttggagttactagttttagagctaccatggcacgatcgacacggaggttttttttcagccaactccaattttttttcctccgtgtcgatcgtgccatgg

SEQ ID NO: 1215 - DNA, 102 bp, synthetic construct
  source 1..102: mol_type = other DNA
gttcaaggacatgaagttttagagctaccatggcacgatcgacacggaggttttttttcagccaactccaattttttttcctccgtgtcgatcgtgccatgg

SEQ ID NO: 1216 - DNA, 102 bp, synthetic construct
  source 1..102: mol_type = other DNA
gaactacactcagttgttttagagctaccatggcacgatcgacacggaggttttttttcagccaactccaattttttttcctccgtgtcgatcgtgccatgg

SEQ ID NO: 1217 - DNA, 101 bp, synthetic construct
  source 1..101: mol_type = other DNA
gggttccacgccttgttttagagctaccatggcacgatcgacacggaggttttttttcagccaactccaattttttttcctccgtgtcgatcgtgccatgg

SEQ ID NO: 1218 - DNA, 101 bp, synthetic construct
  source 1..101: mol_type = other DNA
gtttgttctacctagttttagagctaccatggcacgatcgacacggaggttttttttcagccaactccaattttttttcctccgtgtcgatcgtgccatgg

SEQ ID NO: 1219 - DNA, 101 bp, synthetic construct
  source 1..101: mol_type = other DNA
gagcaaaacaatttgttttagagctaccatggcacgatcgacacggaggttttttttcagccaactccaattttttttcctccgtgtcgatcgtgccatgg

SEQ ID NO: 1220 - DNA, 102 bp, synthetic construct
  source 1..102: mol_type = other DNA
gtaaatgtgcctgacgttttagagctaccatggcacgatcgacacggaggttttttttcagccaactccaattttttttcctccgtgtcgatcgtgccatgg

SEQ ID NO: 1221 - DNA, 102 bp, synthetic construct
  source 1..102: mol_type = other DNA
gtgatgttgcacgacgttttagagctaccatggcacgatcgacacggaggttttttttcagccaactccaattttttttcctccgtgtcgatcgtgccatgg

SEQ ID NO: 1222 - DNA, 102 bp, synthetic construct
  source 1..102: mol_type = other DNA
gtgaagcaactactagttttagagctaccatggcacgatcgacacggaggttttttttcagccaactccaattttttttcctccgtgtcgatcgtgccatgg

SEQ ID NO: 1223 - DNA, 102 bp, synthetic construct
  source 1..102: mol_type = other DNA
gatcggcgagaccaggttttagagctaccatggcacgatcgacacggaggttttttttcagccaactccaattttttttcctccgtgtcgatcgtgccatgg

SEQ ID NO: 1224 - DNA, 102 bp, synthetic construct
  source 1..102: mol_type = other DNA
gtgagacaagaggcggttttagagctaccatggcacgatcgacacggaggttttttttcagccaactccaattttttttcctccgtgtcgatcgtgccatgg

SEQ ID NO: 1225 - DNA, 102 bp, synthetic construct
  source 1..102: mol_type = other DNA
gccaaatgcaaggatgttttagagctacccgaactctctatcgaacgagtttttttttcagccaactccaattttttttactcgttcgatagagagttcggg

SEQ ID NO: 1226 - DNA, 102 bp, synthetic construct
  source 1..102: mol_type = other DNA
gccaatccttgcattgttttagagctacccgaactctctatcgaacgagtttttttttcagccaactccaattttttttactcgttcgatagagagttcggg

SEQ ID NO: 1227 - DNA, 101 bp, synthetic construct
  source 1..101: mol_type = other DNA
gtgatagttagcaagttttagagctacccgaactctctatcgaacgagtttttttttcagccaactccaattttttttactcgttcgatagagagttcggg

SEQ ID NO: 1228 - DNA, 102 bp, synthetic construct
  source 1..102: mol_type = other DNA
gtgaaaaagaactccgttttagagctacccgaactctctatcgaacgagtttttttttcagccaactccaattttttttactcgttcgatagagagttcggg

SEQ ID NO: 1229 - DNA, 102 bp, synthetic construct
  source 1..102: mol_type = other DNA
gataagctcaaaagcgttttagagctacccgaactctctatcgaacgagtttttttttcagccaactccaattttttttactcgttcgatagagagttcggg

SEQ ID NO: 1230 - DNA, 102 bp, synthetic construct
  source 1..102: mol_type = other DNA
gagttggagttactagttttagagctacccgaactctctatcgaacgagtttttttttcagccaactccaattttttttactcgttcgatagagagttcggg

SEQ ID NO: 1231 - DNA, 102 bp, synthetic construct
  source 1..102: mol_type = other DNA
gttcaaggacatgaagttttagagctacccgaactctctatcgaacgagtttttttttcagccaactccaattttttttactcgttcgatagagagttcggg

SEQ ID NO: 1232 - DNA, 102 bp, synthetic construct
  source 1..102: mol_type = other DNA
gaactacactcagttgttttagagctacccgaactctctatcgaacgagtttttttttcagccaactccaattttttttactcgttcgatagagagttcggg

SEQ ID NO: 1233 - DNA, 101 bp, synthetic construct
  source 1..101: mol_type = other DNA
gggttccacgccttgttttagagctacccgaactctctatcgaacgagtttttttttcagccaactccaattttttttactcgttcgatagagagttcggg

SEQ ID NO: 1234 - DNA, 101 bp, synthetic construct
  source 1..101: mol_type = other DNA
gtttgttctacctagttttagagctacccgaactctctatcgaacgagtttttttttcagccaactccaattttttttactcgttcgatagagagttcggg

SEQ ID NO: 1235 - DNA, 101 bp, synthetic construct
  source 1..101: mol_type = other DNA
gagcaaaacaatttgttttagagctacccgaactctctatcgaacgagtttttttttcagccaactccaattttttttactcgttcgatagagagttcggg

SEQ ID NO: 1236 - DNA, 102 bp, synthetic construct
  source 1..102: mol_type = other DNA
gtaaatgtgcctgacgttttagagctacccgaactctctatcgaacgagtttttttttcagccaactccaattttttttactcgttcgatagagagttcggg

SEQ ID NO: 1237 - DNA, 102 bp, synthetic construct
  source 1..102: mol_type = other DNA
gtgatgttgcacgacgttttagagctacccgaactctctatcgaacgagtttttttttcagccaactccaattttttttactcgttcgatagagagttcggg

SEQ ID NO: 1238 - DNA, 102 bp, synthetic construct
  source 1..102: mol_type = other DNA
gtgaagcaactactagttttagagctacccgaactctctatcgaacgagtttttttttcagccaactccaattttttttactcgttcgatagagagttcggg

SEQ ID NO: 1239 - DNA, 102 bp, synthetic construct
  source 1..102: mol_type = other DNA
gatcggcgagaccaggttttagagctacccgaactctctatcgaacgagtttttttttcagccaactccaattttttttactcgttcgatagagagttcggg

SEQ ID NO: 1240 - DNA, 102 bp, synthetic construct
  source 1..102: mol_type = other DNA
gtgagacaagaggcggttttagagctacccgaactctctatcgaacgagtttttttttcagccaactccaattttttttactcgttcgatagagagttcggg

SEQ ID NO: 1241 - DNA, 102 bp, synthetic construct
  source 1..102: mol_type = other DNA
gccaaatgcaaggatgttttagagctacctacacgatagtggtcgtgcgcttttttttcagccaactccaattttttttgcgcacgaccactatcgtgtagg

SEQ ID NO: 1242 - DNA, 102 bp, synthetic construct
  source 1..102: mol_type = other DNA
gccaatccttgcattgttttagagctacctacacgatagtggtcgtgcgcttttttttcagccaactccaattttttttgcgcacgaccactatcgtgtagg

SEQ ID NO: 1243 - DNA, 101 bp, synthetic construct
  source 1..101: mol_type = other DNA
gtgatagttagcaagttttagagctacctacacgatagtggtcgtgcgcttttttttcagccaactccaattttttttgcgcacgaccactatcgtgtagg

SEQ ID NO: 1244 - DNA, 102 bp, synthetic construct
  source 1..102: mol_type = other DNA
gtgaaaaagaactccgttttagagctacctacacgatagtggtcgtgcgcttttttttcagccaactccaattttttttgcgcacgaccactatcgtgtagg

SEQ ID NO: 1245 - DNA, 102 bp, synthetic construct
  source 1..102: mol_type = other DNA
gataagctcaaaagcgttttagagctacctacacgatagtggtcgtgcgcttttttttcagccaactccaattttttttgcgcacgaccactatcgtgtagg

SEQ ID NO: 1246 - DNA, 102 bp, synthetic construct
  source 1..102: mol_type = other DNA
gagttggagttactagttttagagctacctacacgatagtggtcgtgcgcttttttttcagccaactccaattttttttgcgcacgaccactatcgtgtagg

SEQ ID NO: 1247 - DNA, 102 bp, synthetic construct
  source 1..102: mol_type = other DNA
gttcaaggacatgaagttttagagctacctacacgatagtggtcgtgcgcttttttttcagccaactccaattttttttgcgcacgaccactatcgtgtagg

SEQ ID NO: 1248 - DNA, 102 bp, synthetic construct
  source 1..102: mol_type = other DNA
gaactacactcagttgttttagagctacctacacgatagtggtcgtgcgcttttttttcagccaactccaattttttttgcgcacgaccactatcgtgtagg

SEQ ID NO: 1249 - DNA, 101 bp, synthetic construct
  source 1..101: mol_type = other DNA
gggttccacgccttgttttagagctacctacacgatagtggtcgtgcgcttttttttcagccaactccaattttttttgcgcacgaccactatcgtgtagg

SEQ ID NO: 1250 - DNA, 101 bp, synthetic construct
  source 1..101: mol_type = other DNA
gtttgttctacctagttttagagctacctacacgatagtggtcgtgcgcttttttttcagccaactccaattttttttgcgcacgaccactatcgtgtagg

SEQ ID NO: 1251 - DNA, 101 bp, synthetic construct
  source 1..101: mol_type = other DNA
gagcaaaacaatttgttttagagctacctacacgatagtggtcgtgcgcttttttttcagccaactccaattttttttgcgcacgaccactatcgtgtagg

SEQ ID NO: 1252 - DNA, 102 bp, synthetic construct
  source 1..102: mol_type = other DNA
gtaaatgtgcctgacgttttagagctacctacacgatagtggtcgtgcgcttttttttcagccaactccaattttttttgcgcacgaccactatcgtgtagg

SEQ ID NO: 1253 - DNA, 102 bp, synthetic construct
  source 1..102: mol_type = other DNA
gtgatgttgcacgacgttttagagctacctacacgatagtggtcgtgcgcttttttttcagccaactccaattttttttgcgcacgaccactatcgtgtagg

SEQ ID NO: 1254 - DNA, 102 bp, synthetic construct
  source 1..102: mol_type = other DNA
gtgaagcaactactagttttagagctacctacacgatagtggtcgtgcgcttttttttcagccaactccaattttttttgcgcacgaccactatcgtgtagg

SEQ ID NO: 1255 - DNA, 102 bp, synthetic construct
  source 1..102: mol_type = other DNA
gatcggcgagaccaggttttagagctacctacacgatagtggtcgtgcgcttttttttcagccaactccaattttttttgcgcacgaccactatcgtgtagg

SEQ ID NO: 1256 - DNA, 102 bp, synthetic construct
  source 1..102: mol_type = other DNA
gtgagacaagaggcggttttagagctacctacacgatagtggtcgtgcgcttttttttcagccaactccaattttttttgcgcacgaccactatcgtgtagg

SEQ ID NO: 1257 - DNA, 102 bp, synthetic construct
  source 1..102: mol_type = other DNA
gccaaatgcaaggatgttttagagctaccctggcggaacgttcgagtaatttttttttcagccaactccaattttttttattactcgaacgttccgccaggg

SEQ ID NO: 1258 - DNA, 102 bp, synthetic construct
  source 1..102: mol_type = other DNA
gccaatccttgcattgttttagagctaccctggcggaacgttcgagtaatttttttttcagccaactccaattttttttattactcgaacgttccgccaggg

SEQ ID NO: 1259 - DNA, 101 bp, synthetic construct
  source 1..101: mol_type = other DNA
gtgatagttagcaagttttagagctaccctggcggaacgttcgagtaatttttttttcagccaactccaattttttttattactcgaacgttccgccaggg

SEQ ID NO: 1260 - DNA, 102 bp, synthetic construct
  source 1..102: mol_type = other DNA
gtgaaaaagaactccgttttagagctaccctggcggaacgttcgagtaatttttttttcagccaactccaattttttttattactcgaacgttccgccaggg

SEQ ID NO: 1261 - DNA, 102 bp, synthetic construct
  source 1..102: mol_type = other DNA
gataagctcaaaagcgttttagagctaccctggcggaacgttcgagtaatttttttttcagccaactccaattttttttattactcgaacgttccgccaggg

SEQ ID NO: 1262 - DNA, 102 bp, synthetic construct
  source 1..102: mol_type = other DNA
gagttggagttactagttttagagctaccctggcggaacgttcgagtaatttttttttcagccaactccaattttttttattactcgaacgttccgccaggg

SEQ ID NO: 1263 - DNA, 102 bp, synthetic construct
  source 1..102: mol_type = other DNA
gttcaaggacatgaagttttagagctaccctggcggaacgttcgagtaatttttttttcagccaactccaattttttttattactcgaacgttccgccaggg

SEQ ID NO: 1264 - DNA, 102 bp, synthetic construct
  source 1..102: mol_type = other DNA
gaactacactcagttgttttagagctaccctggcggaacgttcgagtaatttttttttcagccaactccaattttttttattactcgaacgttccgccaggg

SEQ ID NO: 1265 - DNA, 101 bp, synthetic construct
  source 1..101: mol_type = other DNA
gggttccacgccttgttttagagctaccctggcggaacgttcgagtaatttttttttcagccaactccaattttttttattactcgaacgttccgccaggg

SEQ ID NO: 1266 - DNA, 101 bp, synthetic construct
  source 1..101: mol_type = other DNA
gtttgttctacctagttttagagctaccctggcggaacgttcgagtaatttttttttcagccaactccaattttttttattactcgaacgttccgccaggg

SEQ ID NO: 1267 - DNA, 101 bp, synthetic construct
  source 1..101: mol_type = other DNA
gagcaaaacaatttgttttagagctaccctggcggaacgttcgagtaatttttttttcagccaactccaattttttttattactcgaacgttccgccaggg

SEQ ID NO: 1268 - DNA, 102 bp, synthetic construct
  source 1..102: mol_type = other DNA
gtaaatgtgcctgacgttttagagctaccctggcggaacgttcgagtaatttttttttcagccaactccaattttttttattactcgaacgttccgccaggg

SEQ ID NO: 1269 - DNA, 102 bp, synthetic construct
  source 1..102: mol_type = other DNA
gtgatgttgcacgacgttttagagctaccctggcggaacgttcgagtaatttttttttcagccaactccaattttttttattactcgaacgttccgccaggg

SEQ ID NO: 1270 - DNA, 102 bp, synthetic construct
  source 1..102: mol_type = other DNA
gtgaagcaactactagttttagagctaccctggcggaacgttcgagtaatttttttttcagccaactccaattttttttattactcgaacgttccgccaggg

SEQ ID NO: 1271 - DNA, 102 bp, synthetic construct
  source 1..102: mol_type = other DNA
gatcggcgagaccaggttttagagctaccctggcggaacgttcgagtaatttttttttcagccaactccaattttttttattactcgaacgttccgccaggg

SEQ ID NO: 1272 - DNA, 102 bp, synthetic construct
  source 1..102: mol_type = other DNA
gtgagacaagaggcggttttagagctaccctggcggaacgttcgagtaatttttttttcagccaactccaattttttttattactcgaacgttccgccaggg

SEQ ID NO: 1273 - DNA, 102 bp, synthetic construct
  source 1..102: mol_type = other DNA
gccaaatgcaaggatgttttagagctacctacactcgacatcggtagctattttttttcagccaactccaatttttttttagctaccgatgtcgagtgtagg

SEQ ID NO: 1274 - DNA, 102 bp, synthetic construct
  source 1..102: mol_type = other DNA
gccaatccttgcattgttttagagctacctacactcgacatcggtagctattttttttcagccaactccaatttttttttagctaccgatgtcgagtgtagg

SEQ ID NO: 1275 - DNA, 101 bp, synthetic construct
  source 1..101: mol_type = other DNA
gtgatagttagcaagttttagagctacctacactcgacatcggtagctattttttttcagccaactccaatttttttttagctaccgatgtcgagtgtagg

SEQ ID NO: 1276 - DNA, 102 bp, synthetic construct
  source 1..102: mol_type = other DNA
gtgaaaaagaactccgttttagagctacctacactcgacatcggtagctattttttttcagccaactccaatttttttttagctaccgatgtcgagtgtagg

SEQ ID NO: 1277 - DNA, 102 bp, synthetic construct
  source 1..102: mol_type = other DNA
gataagctcaaaagcgttttagagctacctacactcgacatcggtagctattttttttcagccaactccaatttttttttagctaccgatgtcgagtgtagg

SEQ ID NO: 1278 - DNA, 102 bp, synthetic construct
  source 1..102: mol_type = other DNA
gagttggagttactagttttagagctacctacactcgacatcggtagctattttttttcagccaactccaatttttttttagctaccgatgtcgagtgtagg

SEQ ID NO: 1279 - DNA, 102 bp, synthetic construct
  source 1..102: mol_type = other DNA
gttcaaggacatgaagttttagagctacctacactcgacatcggtagctattttttttcagccaactccaatttttttttagctaccgatgtcgagtgtagg

SEQ ID NO: 1280 - DNA, 102 bp, synthetic construct
  source 1..102: mol_type = other DNA
gaactacactcagttgttttagagctacctacactcgacatcggtagctattttttttcagccaactccaatttttttttagctaccgatgtcgagtgtagg

SEQ ID NO: 1281 - DNA, 101 bp, synthetic construct
  source 1..101: mol_type = other DNA
gggttccacgccttgttttagagctacctacactcgacatcggtagctattttttttcagccaactccaatttttttttagctaccgatgtcgagtgtagg

SEQ ID NO: 1282 - DNA, 101 bp, synthetic construct
  source 1..101: mol_type = other DNA
gtttgttctacctagttttagagctacctacactcgacatcggtagctattttttttcagccaactccaatttttttttagctaccgatgtcgagtgtagg

SEQ ID NO: 1283 - DNA, 101 bp, synthetic construct
  source 1..101: mol_type = other DNA
gagcaaaacaatttgttttagagctacctacactcgacatcggtagctattttttttcagccaactccaatttttttttagctaccgatgtcgagtgtagg

SEQ ID NO: 1284 - DNA, 102 bp, synthetic construct
  source 1..102: mol_type = other DNA
gtaaatgtgcctgacgttttagagctacctacactcgacatcggtagctattttttttcagccaactccaatttttttttagctaccgatgtcgagtgtagg

SEQ ID NO: 1285 - DNA, 102 bp, synthetic construct
  source 1..102: mol_type = other DNA
gtgatgttgcacgacgttttagagctacctacactcgacatcggtagctattttttttcagccaactccaatttttttttagctaccgatgtcgagtgtagg

SEQ ID NO: 1286 - DNA, 102 bp, synthetic construct
  source 1..102: mol_type = other DNA
gtgaagcaactactagttttagagctacctacactcgacatcggtagctattttttttcagccaactccaatttttttttagctaccgatgtcgagtgtagg

SEQ ID NO: 1287 - DNA, 102 bp, synthetic construct
  source 1..102: mol_type = other DNA
gatcggcgagaccaggttttagagctacctacactcgacatcggtagctattttttttcagccaactccaatttttttttagctaccgatgtcgagtgtagg

SEQ ID NO: 1288 - DNA, 102 bp, synthetic construct
  source 1..102: mol_type = other DNA
gtgagacaagaggcggttttagagctacctacactcgacatcggtagctattttttttcagccaactccaatttttttttagctaccgatgtcgagtgtagg

SEQ ID NO: 1289 - DNA, 104 bp, synthetic construct
  source 1..104: mol_type = other DNA
gctcaggcgcgagacgttttagagctaccgtcgttgtaccgtctacttgacttttttttcagccaactccaattttttttgtcaagtagacggtacaacgacgg

SEQ ID NO: 1290 - DNA, 103 bp, synthetic construct
  source 1..103: mol_type = other DNA
gctttctttatggggttttagagctaccgtcgttgtaccgtctacttgacttttttttcagccaactccaattttttttgtcaagtagacggtacaacgacgg

SEQ ID NO: 1291 - DNA, 104 bp, synthetic construct
  source 1..104: mol_type = other DNA
gaggtcgccgcgcgggttttagagctaccgtcgttgtaccgtctacttgacttttttttcagccaactccaattttttttgtcaagtagacggtacaacgacgg

SEQ ID NO: 1292 - DNA, 103 bp, synthetic construct
  source 1..103: mol_type = other DNA
gcccggctacccatgttttagagctaccgtcgttgtaccgtctacttgacttttttttcagccaactccaattttttttgtcaagtagacggtacaacgacgg

SEQ ID NO: 1293 - DNA, 104 bp, synthetic construct
  source 1..104: mol_type = other DNA
gctcaggcgcgagacgttttagagctaccttcccgacttccgtaggagcgcttttttttcagccaactccaattttttttgcgctcctacggaagtcgggaagg

SEQ ID NO: 1294 - DNA, 103 bp, synthetic construct
  source 1..103: mol_type = other DNA
gctttctttatggggttttagagctaccttcccgacttccgtaggagcgcttttttttcagccaactccaattttttttgcgctcctacggaagtcgggaagg

SEQ ID NO: 1295 - DNA, 104 bp, synthetic construct
  source 1..104: mol_type = other DNA
gaggtcgccgcgcgggttttagagctaccttcccgacttccgtaggagcgcttttttttcagccaactccaattttttttgcgctcctacggaagtcgggaagg

SEQ ID NO: 1296 - DNA, 103 bp, synthetic construct
  source 1..103: mol_type = other DNA
gcccggctacccatgttttagagctaccttcccgacttccgtaggagcgcttttttttcagccaactccaattttttttgcgctcctacggaagtcgggaagg

SEQ ID NO: 1297 - DNA, 104 bp, synthetic construct
  source 1..104: mol_type = other DNA
gctcaggcgcgagacgttttagagctacctgaaggtaaagatcgggtcctcttttttttcagccaactccaattttttttgaggacccgatctttaccttcagg

SEQ ID NO: 1298 - DNA, 103 bp, synthetic construct
  source 1..103: mol_type = other DNA
gctttctttatggggttttagagctacctgaaggtaaagatcgggtcctcttttttttcagccaactccaattttttttgaggacccgatctttaccttcagg

SEQ ID NO: 1299 - DNA, 104 bp, synthetic construct
  source 1..104: mol_type = other DNA
gaggtcgccgcgcgggttttagagctacctgaaggtaaagatcgggtcctcttttttttcagccaactccaattttttttgaggacccgatctttaccttcagg

SEQ ID NO: 1300 - DNA, 103 bp, synthetic construct
  source 1..103: mol_type = other DNA
gcccggctacccatgttttagagctacctgaaggtaaagatcgggtcctcttttttttcagccaactccaattttttttgaggacccgatctttaccttcagg

SEQ ID NO: 1301 - DNA, 102 bp, synthetic construct
  source 1..102: mol_type = other DNA
gctcaggcgcgagacgttttagagctacctggttatagcggacgcactgtttttttttcagccaactccaattttttttacagtgcgtccgctataaccagg

SEQ ID NO: 1302 - DNA, 101 bp, synthetic construct
  source 1..101: mol_type = other DNA
gctttctttatggggttttagagctacctggttatagcggacgcactgtttttttttcagccaactccaattttttttacagtgcgtccgctataaccagg

SEQ ID NO: 1303 - DNA, 102 bp, synthetic construct
  source 1..102: mol_type = other DNA
gaggtcgccgcgcgggttttagagctacctggttatagcggacgcactgtttttttttcagccaactccaattttttttacagtgcgtccgctataaccagg

SEQ ID NO: 1304 - DNA, 101 bp, synthetic construct
  source 1..101: mol_type = other DNA
gcccggctacccatgttttagagctacctggttatagcggacgcactgtttttttttcagccaactccaattttttttacagtgcgtccgctataaccagg

SEQ ID NO: 1305 - DNA, 102 bp, synthetic construct
  source 1..102: mol_type = other DNA
gctcaggcgcgagacgttttagagctaccgcatcgtattatctgcgaagcttttttttcagccaactccaattttttttgcttcgcagataatacgatgcgg

SEQ ID NO: 1306 - DNA, 101 bp, synthetic construct
  source 1..101: mol_type = other DNA
gctttctttatggggttttagagctaccgcatcgtattatctgcgaagcttttttttcagccaactccaattttttttgcttcgcagataatacgatgcgg

SEQ ID NO: 1307 - DNA, 102 bp, synthetic construct
  source 1..102: mol_type = other DNA
gaggtcgccgcgcgggttttagagctaccgcatcgtattatctgcgaagcttttttttcagccaactccaattttttttgcttcgcagataatacgatgcgg

SEQ ID NO: 1308 - DNA, 101 bp, synthetic construct
  source 1..101: mol_type = other DNA
gcccggctacccatgttttagagctaccgcatcgtattatctgcgaagcttttttttcagccaactccaattttttttgcttcgcagataatacgatgcgg

SEQ ID NO: 1309 - DNA, 102 bp, synthetic construct
  source 1..102: mol_type = other DNA
gctcaggcgcgagacgttttagagctaccgctaggacgttcaacggagtcttttttttcagccaactccaattttttttgactccgttgaacgtcctagcgg

SEQ ID NO: 1310 - DNA, 101 bp, synthetic construct
  source 1..101: mol_type = other DNA
gctttctttatggggttttagagctaccgctaggacgttcaacggagtcttttttttcagccaactccaattttttttgactccgttgaacgtcctagcgg

SEQ ID NO: 1311 - DNA, 102 bp, synthetic construct
  source 1..102: mol_type = other DNA
gaggtcgccgcgcgggttttagagctaccgctaggacgttcaacggagtcttttttttcagccaactccaattttttttgactccgttgaacgtcctagcgg

SEQ ID NO: 1312 - DNA, 101 bp, synthetic construct
  source 1..101: mol_type = other DNA
gcccggctacccatgttttagagctaccgctaggacgttcaacggagtcttttttttcagccaactccaattttttttgactccgttgaacgtcctagcgg

SEQ ID NO: 1313 - DNA, 102 bp, synthetic construct
  source 1..102: mol_type = other DNA
gctcaggcgcgagacgttttagagctaccatagcggtactatcggcatctttttttttcagccaactccaattttttttagatgccgatagtaccgctatgg

SEQ ID NO: 1314 - DNA, 101 bp, synthetic construct
  source 1..101: mol_type = other DNA
gctttctttatggggttttagagctaccatagcggtactatcggcatctttttttttcagccaactccaattttttttagatgccgatagtaccgctatgg

SEQ ID NO: 1315 - DNA, 102 bp, synthetic construct
  source 1..102: mol_type = other DNA
gaggtcgccgcgcgggttttagagctaccatagcggtactatcggcatctttttttttcagccaactccaattttttttagatgccgatagtaccgctatgg

SEQ ID NO: 1316 - DNA, 101 bp, synthetic construct
  source 1..101: mol_type = other DNA
gcccggctacccatgttttagagctaccatagcggtactatcggcatctttttttttcagccaactccaattttttttagatgccgatagtaccgctatgg

SEQ ID NO: 1317 - DNA, 102 bp, synthetic construct
  source 1..102: mol_type = other DNA
gctcaggcgcgagacgttttagagctacctcgtactagtctcgcatgaccttttttttcagccaactccaattttttttggtcatgcgagactagtacgagg

SEQ ID NO: 1318 - DNA, 101 bp, synthetic construct
  source 1..101: mol_type = other DNA
gctttctttatggggttttagagctacctcgtactagtctcgcatgaccttttttttcagccaactccaattttttttggtcatgcgagactagtacgagg

SEQ ID NO: 1319 - DNA, 102 bp, synthetic construct
  source 1..102: mol_type = other DNA
gaggtcgccgcgcgggttttagagctacctcgtactagtctcgcatgaccttttttttcagccaactccaattttttttggtcatgcgagactagtacgagg

SEQ ID NO: 1320 - DNA, 101 bp, synthetic construct
  source 1..101: mol_type = other DNA
gcccggctacccatgttttagagctacctcgtactagtctcgcatgaccttttttttcagccaactccaattttttttggtcatgcgagactagtacgagg

SEQ ID NO: 1321 - DNA, 102 bp, synthetic construct
  source 1..102: mol_type = other DNA
gctcaggcgcgagacgttttagagctaccgatagtgctaaacgacgctttttttttttcagccaactccaattttttttaaagcgtcgtttagcactatcgg

SEQ ID NO: 1322 - DNA, 101 bp, synthetic construct
  source 1..101: mol_type = other DNA
gctttctttatggggttttagagctaccgatagtgctaaacgacgctttttttttttcagccaactccaattttttttaaagcgtcgtttagcactatcgg

SEQ ID NO: 1323 - DNA, 102 bp, synthetic construct
  source 1..102: mol_type = other DNA
gaggtcgccgcgcgggttttagagctaccgatagtgctaaacgacgctttttttttttcagccaactccaattttttttaaagcgtcgtttagcactatcgg

SEQ ID NO: 1324 - DNA, 101 bp, synthetic construct
  source 1..101: mol_type = other DNA
gcccggctacccatgttttagagctaccgatagtgctaaacgacgctttttttttttcagccaactccaattttttttaaagcgtcgtttagcactatcgg

SEQ ID NO: 1325 - DNA, 102 bp, synthetic construct
  source 1..102: mol_type = other DNA
gctcaggcgcgagacgttttagagctacccgttatcgacgttcaaggaacttttttttcagccaactccaattttttttgttccttgaacgtcgataacggg

SEQ ID NO: 1326 - DNA, 101 bp, synthetic construct
  source 1..101: mol_type = other DNA
gctttctttatggggttttagagctacccgttatcgacgttcaaggaacttttttttcagccaactccaattttttttgttccttgaacgtcgataacggg

SEQ ID NO: 1327 - DNA, 102 bp, synthetic construct
  source 1..102: mol_type = other DNA
gaggtcgccgcgcgggttttagagctacccgttatcgacgttcaaggaacttttttttcagccaactccaattttttttgttccttgaacgtcgataacggg

SEQ ID NO: 1328 - DNA, 101 bp, synthetic construct
  source 1..101: mol_type = other DNA
gcccggctacccatgttttagagctacccgttatcgacgttcaaggaacttttttttcagccaactccaattttttttgttccttgaacgtcgataacggg

SEQ ID NO: 1329 - DNA, 102 bp, synthetic construct
  source 1..102: mol_type = other DNA
gctcaggcgcgagacgttttagagctaccgatcaatgcggtctgcgtaacttttttttcagccaactccaattttttttgttacgcagaccgcattgatcgg

SEQ ID NO: 1330 - DNA, 101 bp, synthetic construct
  source 1..101: mol_type = other DNA
gctttctttatggggttttagagctaccgatcaatgcggtctgcgtaacttttttttcagccaactccaattttttttgttacgcagaccgcattgatcgg

SEQ ID NO: 1331 - DNA, 102 bp, synthetic construct
  source 1..102: mol_type = other DNA
gaggtcgccgcgcgggttttagagctaccgatcaatgcggtctgcgtaacttttttttcagccaactccaattttttttgttacgcagaccgcattgatcgg

SEQ ID NO: 1332 - DNA, 101 bp, synthetic construct
  source 1..101: mol_type = other DNA
gcccggctacccatgttttagagctaccgatcaatgcggtctgcgtaacttttttttcagccaactccaattttttttgttacgcagaccgcattgatcgg

SEQ ID NO: 1333 - DNA, 102 bp, synthetic construct
  source 1..102: mol_type = other DNA
gctcaggcgcgagacgttttagagctacccttactcgcgatactctcgacttttttttcagccaactccaattttttttgtcgagagtatcgcgagtaaggg

SEQ ID NO: 1334 - DNA, 101 bp, synthetic construct
  source 1..101: mol_type = other DNA
gctttctttatggggttttagagctacccttactcgcgatactctcgacttttttttcagccaactccaattttttttgtcgagagtatcgcgagtaaggg

SEQ ID NO: 1335 - DNA, 102 bp, synthetic construct
  source 1..102: mol_type = other DNA
gaggtcgccgcgcgggttttagagctacccttactcgcgatactctcgacttttttttcagccaactccaattttttttgtcgagagtatcgcgagtaaggg

SEQ ID NO: 1336 - DNA, 101 bp, synthetic construct
  source 1..101: mol_type = other DNA
gcccggctacccatgttttagagctacccttactcgcgatactctcgacttttttttcagccaactccaattttttttgtcgagagtatcgcgagtaaggg

SEQ ID NO: 1337 - DNA, 102 bp, synthetic construct
  source 1..102: mol_type = other DNA
gctcaggcgcgagacgttttagagctaccgcggacggtaagcacggaatattttttttcagccaactccaatttttttttattccgtgcttaccgtccgcgg

SEQ ID NO: 1338 - DNA, 101 bp, synthetic construct
  source 1..101: mol_type = other DNA
gctttctttatggggttttagagctaccgcggacggtaagcacggaatattttttttcagccaactccaatttttttttattccgtgcttaccgtccgcgg

SEQ ID NO: 1339 - DNA, 102 bp, synthetic construct
  source 1..102: mol_type = other DNA
gaggtcgccgcgcgggttttagagctaccgcggacggtaagcacggaatattttttttcagccaactccaatttttttttattccgtgcttaccgtccgcgg

SEQ ID NO: 1340 - DNA, 101 bp, synthetic construct
  source 1..101: mol_type = other DNA
gcccggctacccatgttttagagctaccgcggacggtaagcacggaatattttttttcagccaactccaatttttttttattccgtgcttaccgtccgcgg

SEQ ID NO: 1341 - DNA, 102 bp, synthetic construct
  source 1..102: mol_type = other DNA
gctcaggcgcgagacgttttagagctacctatagtcacgaatcgtagggtttttttttcagccaactccaattttttttaccctacgattcgtgactatagg

SEQ ID NO: 1342 - DNA, 101 bp, synthetic construct
  source 1..101: mol_type = other DNA
gctttctttatggggttttagagctacctatagtcacgaatcgtagggtttttttttcagccaactccaattttttttaccctacgattcgtgactatagg

SEQ ID NO: 1343 - DNA, 102 bp, synthetic construct
  source 1..102: mol_type = other DNA
gaggtcgccgcgcgggttttagagctacctatagtcacgaatcgtagggtttttttttcagccaactccaattttttttaccctacgattcgtgactatagg

SEQ ID NO: 1344 - DNA, 101 bp, synthetic construct
  source 1..101: mol_type = other DNA
gcccggctacccatgttttagagctacctatagtcacgaatcgtagggtttttttttcagccaactccaattttttttaccctacgattcgtgactatagg

SEQ ID NO: 1345 - DNA, 102 bp, synthetic construct
  source 1..102: mol_type = other DNA
gctcaggcgcgagacgttttagagctacccgtcgtcacgtatgcgtagcattttttttcagccaactccaatttttttttgctacgcatacgtgacgacggg

SEQ ID NO: 1346 - DNA, 101 bp, synthetic construct
  source 1..101: mol_type = other DNA
gctttctttatggggttttagagctacccgtcgtcacgtatgcgtagcattttttttcagccaactccaatttttttttgctacgcatacgtgacgacggg

SEQ ID NO: 1347 - DNA, 102 bp, synthetic construct
  source 1..102: mol_type = other DNA
gaggtcgccgcgcgggttttagagctacccgtcgtcacgtatgcgtagcattttttttcagccaactccaatttttttttgctacgcatacgtgacgacggg

SEQ ID NO: 1348 - DNA, 101 bp, synthetic construct
  source 1..101: mol_type = other DNA
gcccggctacccatgttttagagctacccgtcgtcacgtatgcgtagcattttttttcagccaactccaatttttttttgctacgcatacgtgacgacggg

SEQ ID NO: 1349 - DNA, 102 bp, synthetic construct
  source 1..102: mol_type = other DNA
gctcaggcgcgagacgttttagagctacccgagaggtagtagacgacgcattttttttcagccaactccaatttttttttgcgtcgtctactacctctcggg

SEQ ID NO: 1350 - DNA, 101 bp, synthetic construct
  source 1..101: mol_type = other DNA
gctttctttatggggttttagagctacccgagaggtagtagacgacgcattttttttcagccaactccaatttttttttgcgtcgtctactacctctcggg

SEQ ID NO: 1351 - DNA, 102 bp, synthetic construct
  source 1..102: mol_type = other DNA
gaggtcgccgcgcgggttttagagctacccgagaggtagtagacgacgcattttttttcagccaactccaatttttttttgcgtcgtctactacctctcggg

SEQ ID NO: 1352 - DNA, 101 bp, synthetic construct
  source 1..101: mol_type = other DNA
gcccggctacccatgttttagagctacccgagaggtagtagacgacgcattttttttcagccaactccaatttttttttgcgtcgtctactacctctcggg

SEQ ID NO: 1353 - DNA, 102 bp, synthetic construct
  source 1..102: mol_type = other DNA
gctcaggcgcgagacgttttagagctaccgacgtctacggacgggagctattttttttcagccaactccaatttttttttagctcccgtccgtagacgtcgg

SEQ ID NO: 1354 - DNA, 101 bp, synthetic construct
  source 1..101: mol_type = other DNA
gctttctttatggggttttagagctaccgacgtctacggacgggagctattttttttcagccaactccaatttttttttagctcccgtccgtagacgtcgg

SEQ ID NO: 1355 - DNA, 102 bp, synthetic construct
  source 1..102: mol_type = other DNA
gaggtcgccgcgcgggttttagagctaccgacgtctacggacgggagctattttttttcagccaactccaatttttttttagctcccgtccgtagacgtcgg

SEQ ID NO: 1356 - DNA, 101 bp, synthetic construct
  source 1..101: mol_type = other DNA
gcccggctacccatgttttagagctaccgacgtctacggacgggagctattttttttcagccaactccaatttttttttagctcccgtccgtagacgtcgg

SEQ ID NO: 1357 - DNA, 102 bp, synthetic construct
  source 1..102: mol_type = other DNA
gctcaggcgcgagacgttttagagctaccaaagctcattcgcgactgagcttttttttcagccaactccaattttttttgctcagtcgcgaatgagctttgg

SEQ ID NO: 1358 - DNA, 101 bp, synthetic construct
  source 1..101: mol_type = other DNA
gctttctttatggggttttagagctaccaaagctcattcgcgactgagcttttttttcagccaactccaattttttttgctcagtcgcgaatgagctttgg

SEQ ID NO: 1359 - DNA, 102 bp, synthetic construct
  source 1..102: mol_type = other DNA
gaggtcgccgcgcgggttttagagctaccaaagctcattcgcgactgagcttttttttcagccaactccaattttttttgctcagtcgcgaatgagctttgg

SEQ ID NO: 1360 - DNA, 101 bp, synthetic construct
  source 1..101: mol_type = other DNA
gcccggctacccatgttttagagctaccaaagctcattcgcgactgagcttttttttcagccaactccaattttttttgctcagtcgcgaatgagctttgg

SEQ ID NO: 1361 - DNA, 102 bp, synthetic construct
  source 1..102: mol_type = other DNA
gctcaggcgcgagacgttttagagctaccatggcacgatcgacacggaggttttttttcagccaactccaattttttttcctccgtgtcgatcgtgccatgg

SEQ ID NO: 1362 - DNA, 101 bp, synthetic construct
  source 1..101: mol_type = other DNA
gctttctttatggggttttagagctaccatggcacgatcgacacggaggttttttttcagccaactccaattttttttcctccgtgtcgatcgtgccatgg

SEQ ID NO: 1363 - DNA, 102 bp, synthetic construct
  source 1..102: mol_type = other DNA
gaggtcgccgcgcgggttttagagctaccatggcacgatcgacacggaggttttttttcagccaactccaattttttttcctccgtgtcgatcgtgccatgg

SEQ ID NO: 1364 - DNA, 101 bp, synthetic construct
  source 1..101: mol_type = other DNA
gcccggctacccatgttttagagctaccatggcacgatcgacacggaggttttttttcagccaactccaattttttttcctccgtgtcgatcgtgccatgg

SEQ ID NO: 1365 - DNA, 102 bp, synthetic construct
  source 1..102: mol_type = other DNA
gctcaggcgcgagacgttttagagctacccgaactctctatcgaacgagtttttttttcagccaactccaattttttttactcgttcgatagagagttcggg

SEQ ID NO: 1366 - DNA, 101 bp, synthetic construct
  source 1..101: mol_type = other DNA
gctttctttatggggttttagagctacccgaactctctatcgaacgagtttttttttcagccaactccaattttttttactcgttcgatagagagttcggg

SEQ ID NO: 1367 - DNA, 102 bp, synthetic construct
  source 1..102: mol_type = other DNA
gaggtcgccgcgcgggttttagagctacccgaactctctatcgaacgagtttttttttcagccaactccaattttttttactcgttcgatagagagttcggg

SEQ ID NO: 1368 - DNA, 101 bp, synthetic construct
  source 1..101: mol_type = other DNA
gcccggctacccatgttttagagctacccgaactctctatcgaacgagtttttttttcagccaactccaattttttttactcgttcgatagagagttcggg

SEQ ID NO: 1369 - DNA, 102 bp, synthetic construct
  source 1..102: mol_type = other DNA
gctcaggcgcgagacgttttagagctacctacacgatagtggtcgtgcgcttttttttcagccaactccaattttttttgcgcacgaccactatcgtgtagg

SEQ ID NO: 1370 - DNA, 101 bp, synthetic construct
  source 1..101: mol_type = other DNA
gctttctttatggggttttagagctacctacacgatagtggtcgtgcgcttttttttcagccaactccaattttttttgcgcacgaccactatcgtgtagg

SEQ ID NO: 1371 - DNA, 102 bp, synthetic construct
  source 1..102: mol_type = other DNA
gaggtcgccgcgcgggttttagagctacctacacgatagtggtcgtgcgcttttttttcagccaactccaattttttttgcgcacgaccactatcgtgtagg

SEQ ID NO: 1372 - DNA, 101 bp, synthetic construct
  source 1..101: mol_type = other DNA
gcccggctacccatgttttagagctacctacacgatagtggtcgtgcgcttttttttcagccaactccaattttttttgcgcacgaccactatcgtgtagg

SEQ ID NO: 1373 - DNA, 102 bp, synthetic construct
  source 1..102: mol_type = other DNA
gctcaggcgcgagacgttttagagctaccctggcggaacgttcgagtaatttttttttcagccaactccaattttttttattactcgaacgttccgccaggg

SEQ ID NO: 1374 - DNA, 101 bp, synthetic construct
  source 1..101: mol_type = other DNA
gctttctttatggggttttagagctaccctggcggaacgttcgagtaatttttttttcagccaactccaattttttttattactcgaacgttccgccaggg

SEQ ID NO: 1375 - DNA, 102 bp, synthetic construct
  source 1..102: mol_type = other DNA
gaggtcgccgcgcgggttttagagctaccctggcggaacgttcgagtaatttttttttcagccaactccaattttttttattactcgaacgttccgccaggg

SEQ ID NO: 1376 - DNA, 101 bp, synthetic construct
  source 1..101: mol_type = other DNA
gcccggctacccatgttttagagctaccctggcggaacgttcgagtaatttttttttcagccaactccaattttttttattactcgaacgttccgccaggg

SEQ ID NO: 1377 - DNA, 102 bp, synthetic construct
  source 1..102: mol_type = other DNA
gctcaggcgcgagacgttttagagctacctacactcgacatcggtagctattttttttcagccaactccaatttttttttagctaccgatgtcgagtgtagg

SEQ ID NO: 1378 - DNA, 101 bp, synthetic construct
  source 1..101: mol_type = other DNA
gctttctttatggggttttagagctacctacactcgacatcggtagctattttttttcagccaactccaatttttttttagctaccgatgtcgagtgtagg

SEQ ID NO: 1379 - DNA, 102 bp, synthetic construct
  source 1..102: mol_type = other DNA
gaggtcgccgcgcgggttttagagctacctacactcgacatcggtagctattttttttcagccaactccaatttttttttagctaccgatgtcgagtgtagg

SEQ ID NO: 1380 - DNA, 101 bp, synthetic construct
  source 1..101: mol_type = other DNA
gcccggctacccatgttttagagctacctacactcgacatcggtagctattttttttcagccaactccaatttttttttagctaccgatgtcgagtgtagg

SEQ ID NO: 1381 - DNA, 104 bp, synthetic construct
  source 1..104: mol_type = other DNA
gcaaacttacacactgttttagagctaccgtcgttgtaccgtctacttgacttttttttcagccaactccaattttttttgtcaagtagacggtacaacgacgg

SEQ ID NO: 1382 - DNA, 104 bp, synthetic construct
  source 1..104: mol_type = other DNA
gaaagggcggacggtgttttagagctaccgtcgttgtaccgtctacttgacttttttttcagccaactccaattttttttgtcaagtagacggtacaacgacgg

SEQ ID NO: 1383 - DNA, 104 bp, synthetic construct
  source 1..104: mol_type = other DNA
gattggacccgatttgttttagagctaccgtcgttgtaccgtctacttgacttttttttcagccaactccaattttttttgtcaagtagacggtacaacgacgg

SEQ ID NO: 1384 - DNA, 103 bp, synthetic construct
  source 1..103: mol_type = other DNA
gtggctctaaggtggttttagagctaccgtcgttgtaccgtctacttgacttttttttcagccaactccaattttttttgtcaagtagacggtacaacgacgg

SEQ ID NO: 1385 - DNA, 104 bp, synthetic construct
  source 1..104: mol_type = other DNA
gcaaacttacacactgttttagagctaccttcccgacttccgtaggagcgcttttttttcagccaactccaattttttttgcgctcctacggaagtcgggaagg

SEQ ID NO: 1386 - DNA, 104 bp, synthetic construct
  source 1..104: mol_type = other DNA
gaaagggcggacggtgttttagagctaccttcccgacttccgtaggagcgcttttttttcagccaactccaattttttttgcgctcctacggaagtcgggaagg

SEQ ID NO: 1387 - DNA, 104 bp, synthetic construct
  source 1..104: mol_type = other DNA
gattggacccgatttgttttagagctaccttcccgacttccgtaggagcgcttttttttcagccaactccaattttttttgcgctcctacggaagtcgggaagg

SEQ ID NO: 1388 - DNA, 103 bp, synthetic construct
  source 1..103: mol_type = other DNA
gtggctctaaggtggttttagagctaccttcccgacttccgtaggagcgcttttttttcagccaactccaattttttttgcgctcctacggaagtcgggaagg

SEQ ID NO: 1389 - DNA, 104 bp, synthetic construct
  source 1..104: mol_type = other DNA
gcaaacttacacactgttttagagctacctgaaggtaaagatcgggtcctcttttttttcagccaactccaattttttttgaggacccgatctttaccttcagg

SEQ ID NO: 1390 - DNA, 104 bp, synthetic construct
  source 1..104: mol_type = other DNA
gaaagggcggacggtgttttagagctacctgaaggtaaagatcgggtcctcttttttttcagccaactccaattttttttgaggacccgatctttaccttcagg

SEQ ID NO: 1391 - DNA, 104 bp, synthetic construct
  source 1..104: mol_type = other DNA
gattggacccgatttgttttagagctacctgaaggtaaagatcgggtcctcttttttttcagccaactccaattttttttgaggacccgatctttaccttcagg

SEQ ID NO: 1392 - DNA, 103 bp, synthetic construct
  source 1..103: mol_type = other DNA
gtggctctaaggtggttttagagctacctgaaggtaaagatcgggtcctcttttttttcagccaactccaattttttttgaggacccgatctttaccttcagg

SEQ ID NO: 1393 - DNA, 102 bp, synthetic construct
  source 1..102: mol_type = other DNA
gcaaacttacacactgttttagagctacctggttatagcggacgcactgtttttttttcagccaactccaattttttttacagtgcgtccgctataaccagg

SEQ ID NO: 1394 - DNA, 102 bp, synthetic construct
  source 1..102: mol_type = other DNA
gaaagggcggacggtgttttagagctacctggttatagcggacgcactgtttttttttcagccaactccaattttttttacagtgcgtccgctataaccagg

SEQ ID NO: 1395 - DNA, 102 bp, synthetic construct
  source 1..102: mol_type = other DNA
gattggacccgatttgttttagagctacctggttatagcggacgcactgtttttttttcagccaactccaattttttttacagtgcgtccgctataaccagg

SEQ ID NO: 1396 - DNA, 101 bp, synthetic construct
  source 1..101: mol_type = other DNA
gtggctctaaggtggttttagagctacctggttatagcggacgcactgtttttttttcagccaactccaattttttttacagtgcgtccgctataaccagg

SEQ ID NO: 1397 - DNA, 102 bp, synthetic construct
  source 1..102: mol_type = other DNA
gcaaacttacacactgttttagagctaccgcatcgtattatctgcgaagcttttttttcagccaactccaattttttttgcttcgcagataatacgatgcgg

SEQ ID NO: 1398 - DNA, 102 bp, synthetic construct
  source 1..102: mol_type = other DNA
gaaagggcggacggtgttttagagctaccgcatcgtattatctgcgaagcttttttttcagccaactccaattttttttgcttcgcagataatacgatgcgg

SEQ ID NO: 1399 - DNA, 102 bp, synthetic construct
  source 1..102: mol_type = other DNA
gattggacccgatttgttttagagctaccgcatcgtattatctgcgaagcttttttttcagccaactccaattttttttgcttcgcagataatacgatgcgg

SEQ ID NO: 1400 - DNA, 101 bp, synthetic construct
  source 1..101: mol_type = other DNA
gtggctctaaggtggttttagagctaccgcatcgtattatctgcgaagcttttttttcagccaactccaattttttttgcttcgcagataatacgatgcgg

SEQ ID NO: 1401 - DNA, 102 bp, synthetic construct
  source 1..102: mol_type = other DNA
gcaaacttacacactgttttagagctaccgctaggacgttcaacggagtcttttttttcagccaactccaattttttttgactccgttgaacgtcctagcgg

SEQ ID NO: 1402 - DNA, 102 bp, synthetic construct
  source 1..102: mol_type = other DNA
gaaagggcggacggtgttttagagctaccgctaggacgttcaacggagtcttttttttcagccaactccaattttttttgactccgttgaacgtcctagcgg

SEQ ID NO: 1403 - DNA, 102 bp, synthetic construct
  source 1..102: mol_type = other DNA
gattggacccgatttgttttagagctaccgctaggacgttcaacggagtcttttttttcagccaactccaattttttttgactccgttgaacgtcctagcgg

SEQ ID NO: 1404 - DNA, 101 bp, synthetic construct
  source 1..101: mol_type = other DNA
gtggctctaaggtggttttagagctaccgctaggacgttcaacggagtcttttttttcagccaactccaattttttttgactccgttgaacgtcctagcgg

SEQ ID NO: 1405 - DNA, 102 bp, synthetic construct
  source 1..102: mol_type = other DNA
gcaaacttacacactgttttagagctaccatagcggtactatcggcatctttttttttcagccaactccaattttttttagatgccgatagtaccgctatgg

SEQ ID NO: 1406 - DNA, 102 bp, synthetic construct
  source 1..102: mol_type = other DNA
gaaagggcggacggtgttttagagctaccatagcggtactatcggcatctttttttttcagccaactccaattttttttagatgccgatagtaccgctatgg

SEQ ID NO: 1407 - DNA, 102 bp, synthetic construct
  source 1..102: mol_type = other DNA
gattggacccgatttgttttagagctaccatagcggtactatcggcatctttttttttcagccaactccaattttttttagatgccgatagtaccgctatgg

SEQ ID NO: 1408 - DNA, 101 bp, synthetic construct
  source 1..101: mol_type = other DNA
gtggctctaaggtggttttagagctaccatagcggtactatcggcatctttttttttcagccaactccaattttttttagatgccgatagtaccgctatgg

SEQ ID NO: 1409 - DNA, 102 bp, synthetic construct
  source 1..102: mol_type = other DNA
gcaaacttacacactgttttagagctacctcgtactagtctcgcatgaccttttttttcagccaactccaattttttttggtcatgcgagactagtacgagg

SEQ ID NO: 1410 - DNA, 102 bp, synthetic construct
  source 1..102: mol_type = other DNA
gaaagggcggacggtgttttagagctacctcgtactagtctcgcatgaccttttttttcagccaactccaattttttttggtcatgcgagactagtacgagg

SEQ ID NO: 1411 - DNA, 102 bp, synthetic construct
  source 1..102: mol_type = other DNA
gattggacccgatttgttttagagctacctcgtactagtctcgcatgaccttttttttcagccaactccaattttttttggtcatgcgagactagtacgagg

SEQ ID NO: 1412 - DNA, 101 bp, synthetic construct
  source 1..101: mol_type = other DNA
gtggctctaaggtggttttagagctacctcgtactagtctcgcatgaccttttttttcagccaactccaattttttttggtcatgcgagactagtacgagg

SEQ ID NO: 1413 - DNA, 102 bp, synthetic construct
  source 1..102: mol_type = other DNA
gcaaacttacacactgttttagagctaccgatagtgctaaacgacgctttttttttttcagccaactccaattttttttaaagcgtcgtttagcactatcgg

SEQ ID NO: 1414 - DNA, 102 bp, synthetic construct
  source 1..102: mol_type = other DNA
gaaagggcggacggtgttttagagctaccgatagtgctaaacgacgctttttttttttcagccaactccaattttttttaaagcgtcgtttagcactatcgg

SEQ ID NO: 1415 - DNA, 102 bp, synthetic construct
  source 1..102: mol_type = other DNA
gattggacccgatttgttttagagctaccgatagtgctaaacgacgctttttttttttcagccaactccaattttttttaaagcgtcgtttagcactatcgg

SEQ ID NO: 1416 - DNA, 101 bp, synthetic construct
  source 1..101: mol_type = other DNA
gtggctctaaggtggttttagagctaccgatagtgctaaacgacgctttttttttttcagccaactccaattttttttaaagcgtcgtttagcactatcgg

SEQ ID NO: 1417 - DNA, 102 bp, synthetic construct
  source 1..102: mol_type = other DNA
gcaaacttacacactgttttagagctacccgttatcgacgttcaaggaacttttttttcagccaactccaattttttttgttccttgaacgtcgataacggg

SEQ ID NO: 1418 - DNA, 102 bp, synthetic construct
  source 1..102: mol_type = other DNA
gaaagggcggacggtgttttagagctacccgttatcgacgttcaaggaacttttttttcagccaactccaattttttttgttccttgaacgtcgataacggg

SEQ ID NO: 1419 - DNA, 102 bp, synthetic construct
  source 1..102: mol_type = other DNA
gattggacccgatttgttttagagctacccgttatcgacgttcaaggaacttttttttcagccaactccaattttttttgttccttgaacgtcgataacggg

SEQ ID NO: 1420 - DNA, 101 bp, synthetic construct
  source 1..101: mol_type = other DNA
gtggctctaaggtggttttagagctacccgttatcgacgttcaaggaacttttttttcagccaactccaattttttttgttccttgaacgtcgataacggg

SEQ ID NO: 1421 - DNA, 102 bp, synthetic construct
  source 1..102: mol_type = other DNA
gcaaacttacacactgttttagagctaccgatcaatgcggtctgcgtaacttttttttcagccaactccaattttttttgttacgcagaccgcattgatcgg

SEQ ID NO: 1422 - DNA, 102 bp, synthetic construct
  source 1..102: mol_type = other DNA
gaaagggcggacggtgttttagagctaccgatcaatgcggtctgcgtaacttttttttcagccaactccaattttttttgttacgcagaccgcattgatcgg

SEQ ID NO: 1423 - DNA, 102 bp, synthetic construct
  source 1..102: mol_type = other DNA
gattggacccgatttgttttagagctaccgatcaatgcggtctgcgtaacttttttttcagccaactccaattttttttgttacgcagaccgcattgatcgg

SEQ ID NO: 1424 - DNA, 101 bp, synthetic construct
  source 1..101: mol_type = other DNA
gtggctctaaggtggttttagagctaccgatcaatgcggtctgcgtaacttttttttcagccaactccaattttttttgttacgcagaccgcattgatcgg

SEQ ID NO: 1425 - DNA, 102 bp, synthetic construct
  source 1..102: mol_type = other DNA
gcaaacttacacactgttttagagctacccttactcgcgatactctcgacttttttttcagccaactccaattttttttgtcgagagtatcgcgagtaaggg

SEQ ID NO: 1426 - DNA, 102 bp, synthetic construct
  source 1..102: mol_type = other DNA
gaaagggcggacggtgttttagagctacccttactcgcgatactctcgacttttttttcagccaactccaattttttttgtcgagagtatcgcgagtaaggg

SEQ ID NO: 1427 - DNA, 102 bp, synthetic construct
  source 1..102: mol_type = other DNA
gattggacccgatttgttttagagctacccttactcgcgatactctcgacttttttttcagccaactccaattttttttgtcgagagtatcgcgagtaaggg

SEQ ID NO: 1428 - DNA, 101 bp, synthetic construct
  source 1..101: mol_type = other DNA
gtggctctaaggtggttttagagctacccttactcgcgatactctcgacttttttttcagccaactccaattttttttgtcgagagtatcgcgagtaaggg

SEQ ID NO: 1429 - DNA, 102 bp, synthetic construct
  source 1..102: mol_type = other DNA
gcaaacttacacactgttttagagctaccgcggacggtaagcacggaatattttttttcagccaactccaatttttttttattccgtgcttaccgtccgcgg

SEQ ID NO: 1430 - DNA, 102 bp, synthetic construct
  source 1..102: mol_type = other DNA
gaaagggcggacggtgttttagagctaccgcggacggtaagcacggaatattttttttcagccaactccaatttttttttattccgtgcttaccgtccgcgg

SEQ ID NO: 1431 - DNA, 102 bp, synthetic construct
  source 1..102: mol_type = other DNA
gattggacccgatttgttttagagctaccgcggacggtaagcacggaatattttttttcagccaactccaatttttttttattccgtgcttaccgtccgcgg

SEQ ID NO: 1432 - DNA, 101 bp, synthetic construct
  source 1..101: mol_type = other DNA
gtggctctaaggtggttttagagctaccgcggacggtaagcacggaatattttttttcagccaactccaatttttttttattccgtgcttaccgtccgcgg

SEQ ID NO: 1433 - DNA, 102 bp, synthetic construct
  source 1..102: mol_type = other DNA
gcaaacttacacactgttttagagctacctatagtcacgaatcgtagggtttttttttcagccaactccaattttttttaccctacgattcgtgactatagg

SEQ ID NO: 1434 - DNA, 102 bp, synthetic construct
  source 1..102: mol_type = other DNA
gaaagggcggacggtgttttagagctacctatagtcacgaatcgtagggtttttttttcagccaactccaattttttttaccctacgattcgtgactatagg

SEQ ID NO: 1435 - DNA, 102 bp, synthetic construct
  source 1..102: mol_type = other DNA
gattggacccgatttgttttagagctacctatagtcacgaatcgtagggtttttttttcagccaactccaattttttttaccctacgattcgtgactatagg

SEQ ID NO: 1436 - DNA, 101 bp, synthetic construct
  source 1..101: mol_type = other DNA
gtggctctaaggtggttttagagctacctatagtcacgaatcgtagggtttttttttcagccaactccaattttttttaccctacgattcgtgactatagg

SEQ ID NO: 1437 - DNA, 102 bp, synthetic construct
  source 1..102: mol_type = other DNA
gcaaacttacacactgttttagagctacccgtcgtcacgtatgcgtagcattttttttcagccaactccaatttttttttgctacgcatacgtgacgacggg

SEQ ID NO: 1438 - DNA, 102 bp, synthetic construct
  source 1..102: mol_type = other DNA
gaaagggcggacggtgttttagagctacccgtcgtcacgtatgcgtagcattttttttcagccaactccaatttttttttgctacgcatacgtgacgacggg

SEQ ID NO: 1439 - DNA, 102 bp, synthetic construct
  source 1..102: mol_type = other DNA
gattggacccgatttgttttagagctacccgtcgtcacgtatgcgtagcattttttttcagccaactccaatttttttttgctacgcatacgtgacgacggg

SEQ ID NO: 1440 - DNA, 101 bp, synthetic construct
  source 1..101: mol_type = other DNA
gtggctctaaggtggttttagagctacccgtcgtcacgtatgcgtagcattttttttcagccaactccaatttttttttgctacgcatacgtgacgacggg

SEQ ID NO: 1441 - DNA, 102 bp, synthetic construct
  source 1..102: mol_type = other DNA
gcaaacttacacactgttttagagctacccgagaggtagtagacgacgcattttttttcagccaactccaatttttttttgcgtcgtctactacctctcggg

SEQ ID NO: 1442 - DNA, 102 bp, synthetic construct
  source 1..102: mol_type = other DNA
gaaagggcggacggtgttttagagctacccgagaggtagtagacgacgcattttttttcagccaactccaatttttttttgcgtcgtctactacctctcggg

SEQ ID NO: 1443 - DNA, 102 bp, synthetic construct
  source 1..102: mol_type = other DNA
gattggacccgatttgttttagagctacccgagaggtagtagacgacgcattttttttcagccaactccaatttttttttgcgtcgtctactacctctcggg

SEQ ID NO: 1444 - DNA, 101 bp, synthetic construct
  source 1..101: mol_type = other DNA
gtggctctaaggtggttttagagctacccgagaggtagtagacgacgcattttttttcagccaactccaatttttttttgcgtcgtctactacctctcggg

SEQ ID NO: 1445 - DNA, 102 bp, synthetic construct
  source 1..102: mol_type = other DNA
gcaaacttacacactgttttagagctaccgacgtctacggacgggagctattttttttcagccaactccaatttttttttagctcccgtccgtagacgtcgg

SEQ ID NO: 1446 - DNA, 102 bp, synthetic construct
  source 1..102: mol_type = other DNA
gaaagggcggacggtgttttagagctaccgacgtctacggacgggagctattttttttcagccaactccaatttttttttagctcccgtccgtagacgtcgg

SEQ ID NO: 1447 - DNA, 102 bp, synthetic construct
  source 1..102: mol_type = other DNA
gattggacccgatttgttttagagctaccgacgtctacggacgggagctattttttttcagccaactccaatttttttttagctcccgtccgtagacgtcgg

SEQ ID NO: 1448 - DNA, 101 bp, synthetic construct
  source 1..101: mol_type = other DNA
gtggctctaaggtggttttagagctaccgacgtctacggacgggagctattttttttcagccaactccaatttttttttagctcccgtccgtagacgtcgg

SEQ ID NO: 1449 - DNA, 102 bp, synthetic construct
  source 1..102: mol_type = other DNA
gcaaacttacacactgttttagagctaccaaagctcattcgcgactgagcttttttttcagccaactccaattttttttgctcagtcgcgaatgagctttgg

SEQ ID NO: 1450 - DNA, 102 bp, synthetic construct
  source 1..102: mol_type = other DNA
gaaagggcggacggtgttttagagctaccaaagctcattcgcgactgagcttttttttcagccaactccaattttttttgctcagtcgcgaatgagctttgg

SEQ ID NO: 1451 - DNA, 102 bp, synthetic construct
  source 1..102: mol_type = other DNA
gattggacccgatttgttttagagctaccaaagctcattcgcgactgagcttttttttcagccaactccaattttttttgctcagtcgcgaatgagctttgg

SEQ ID NO: 1452 - DNA, 101 bp, synthetic construct
  source 1..101: mol_type = other DNA
gtggctctaaggtggttttagagctaccaaagctcattcgcgactgagcttttttttcagccaactccaattttttttgctcagtcgcgaatgagctttgg

SEQ ID NO: 1453 - DNA, 102 bp, synthetic construct
  source 1..102: mol_type = other DNA
gcaaacttacacactgttttagagctaccatggcacgatcgacacggaggttttttttcagccaactccaattttttttcctccgtgtcgatcgtgccatgg

SEQ ID NO: 1454 - DNA, 102 bp, synthetic construct
  source 1..102: mol_type = other DNA
gaaagggcggacggtgttttagagctaccatggcacgatcgacacggaggttttttttcagccaactccaattttttttcctccgtgtcgatcgtgccatgg

SEQ ID NO: 1455 - DNA, 102 bp, synthetic construct
  source 1..102: mol_type = other DNA
gattggacccgatttgttttagagctaccatggcacgatcgacacggaggttttttttcagccaactccaattttttttcctccgtgtcgatcgtgccatgg

SEQ ID NO: 1456 - DNA, 101 bp, synthetic construct
  source 1..101: mol_type = other DNA
gtggctctaaggtggttttagagctaccatggcacgatcgacacggaggttttttttcagccaactccaattttttttcctccgtgtcgatcgtgccatgg

SEQ ID NO: 1457 - DNA, 102 bp, synthetic construct
  source 1..102: mol_type = other DNA
gcaaacttacacactgttttagagctacccgaactctctatcgaacgagtttttttttcagccaactccaattttttttactcgttcgatagagagttcggg

SEQ ID NO: 1458 - DNA, 102 bp, synthetic construct
  source 1..102: mol_type = other DNA
gaaagggcggacggtgttttagagctacccgaactctctatcgaacgagtttttttttcagccaactccaattttttttactcgttcgatagagagttcggg

SEQ ID NO: 1459 - DNA, 102 bp, synthetic construct
  source 1..102: mol_type = other DNA
gattggacccgatttgttttagagctacccgaactctctatcgaacgagtttttttttcagccaactccaattttttttactcgttcgatagagagttcggg

SEQ ID NO: 1460 - DNA, 101 bp, synthetic construct
  source 1..101: mol_type = other DNA
gtggctctaaggtggttttagagctacccgaactctctatcgaacgagtttttttttcagccaactccaattttttttactcgttcgatagagagttcggg

SEQ ID NO: 1461 - DNA, 102 bp, synthetic construct
  source 1..102: mol_type = other DNA
gcaaacttacacactgttttagagctacctacacgatagtggtcgtgcgcttttttttcagccaactccaattttttttgcgcacgaccactatcgtgtagg

SEQ ID NO: 1462 - DNA, 102 bp, synthetic construct
  source 1..102: mol_type = other DNA
gaaagggcggacggtgttttagagctacctacacgatagtggtcgtgcgcttttttttcagccaactccaattttttttgcgcacgaccactatcgtgtagg

SEQ ID NO: 1463 - DNA, 102 bp, synthetic construct
  source 1..102: mol_type = other DNA
gattggacccgatttgttttagagctacctacacgatagtggtcgtgcgcttttttttcagccaactccaattttttttgcgcacgaccactatcgtgtagg

SEQ ID NO: 1464 - DNA, 101 bp, synthetic construct
  source 1..101: mol_type = other DNA
gtggctctaaggtggttttagagctacctacacgatagtggtcgtgcgcttttttttcagccaactccaattttttttgcgcacgaccactatcgtgtagg

SEQ ID NO: 1465 - DNA, 102 bp, synthetic construct
  source 1..102: mol_type = other DNA
gcaaacttacacactgttttagagctaccctggcggaacgttcgagtaatttttttttcagccaactccaattttttttattactcgaacgttccgccaggg

SEQ ID NO: 1466 - DNA, 102 bp, synthetic construct
  source 1..102: mol_type = other DNA
gaaagggcggacggtgttttagagctaccctggcggaacgttcgagtaatttttttttcagccaactccaattttttttattactcgaacgttccgccaggg

SEQ ID NO: 1467 - DNA, 102 bp, synthetic construct
  source 1..102: mol_type = other DNA
gattggacccgatttgttttagagctaccctggcggaacgttcgagtaatttttttttcagccaactccaattttttttattactcgaacgttccgccaggg

SEQ ID NO: 1468 - DNA, 101 bp, synthetic construct
  source 1..101: mol_type = other DNA
gtggctctaaggtggttttagagctaccctggcggaacgttcgagtaatttttttttcagccaactccaattttttttattactcgaacgttccgccaggg

SEQ ID NO: 1469 - DNA, 102 bp, synthetic construct
  source 1..102: mol_type = other DNA
gcaaacttacacactgttttagagctacctacactcgacatcggtagctattttttttcagccaactccaatttttttttagctaccgatgtcgagtgtagg

SEQ ID NO: 1470 - DNA, 102 bp, synthetic construct
  source 1..102: mol_type = other DNA
gaaagggcggacggtgttttagagctacctacactcgacatcggtagctattttttttcagccaactccaatttttttttagctaccgatgtcgagtgtagg

SEQ ID NO: 1471 - DNA, 102 bp, synthetic construct
  source 1..102: mol_type = other DNA
gattggacccgatttgttttagagctacctacactcgacatcggtagctattttttttcagccaactccaatttttttttagctaccgatgtcgagtgtagg

SEQ ID NO: 1472 - DNA, 101 bp, synthetic construct
  source 1..101: mol_type = other DNA
gtggctctaaggtggttttagagctacctacactcgacatcggtagctattttttttcagccaactccaatttttttttagctaccgatgtcgagtgtagg

SEQ ID NO: 1473 - DNA, 104 bp, synthetic construct
  source 1..104: mol_type = other DNA
gtgagacgtagggatgttttagagctaccgtcgttgtaccgtctacttgacttttttttcagccaactccaattttttttgtcaagtagacggtacaacgacgg

SEQ ID NO: 1474 - DNA, 103 bp, synthetic construct
  source 1..103: mol_type = other DNA
gcgagtcttgccatgttttagagctaccgtcgttgtaccgtctacttgacttttttttcagccaactccaattttttttgtcaagtagacggtacaacgacgg

SEQ ID NO: 1475 - DNA, 103 bp, synthetic construct
  source 1..103: mol_type = other DNA
ggaccggacagggagttttagagctaccgtcgttgtaccgtctacttgacttttttttcagccaactccaattttttttgtcaagtagacggtacaacgacgg

SEQ ID NO: 1476 - DNA, 104 bp, synthetic construct
  source 1..104: mol_type = other DNA
gccgcccaatgaggggttttagagctaccgtcgttgtaccgtctacttgacttttttttcagccaactccaattttttttgtcaagtagacggtacaacgacgg

SEQ ID NO: 1477 - DNA, 104 bp, synthetic construct
  source 1..104: mol_type = other DNA
gtgagacgtagggatgttttagagctaccttcccgacttccgtaggagcgcttttttttcagccaactccaattttttttgcgctcctacggaagtcgggaagg

SEQ ID NO: 1478 - DNA, 103 bp, synthetic construct
  source 1..103: mol_type = other DNA
gcgagtcttgccatgttttagagctaccttcccgacttccgtaggagcgcttttttttcagccaactccaattttttttgcgctcctacggaagtcgggaagg

SEQ ID NO: 1479 - DNA, 103 bp, synthetic construct
  source 1..103: mol_type = other DNA
ggaccggacagggagttttagagctaccttcccgacttccgtaggagcgcttttttttcagccaactccaattttttttgcgctcctacggaagtcgggaagg

SEQ ID NO: 1480 - DNA, 104 bp, synthetic construct
  source 1..104: mol_type = other DNA
gccgcccaatgaggggttttagagctaccttcccgacttccgtaggagcgcttttttttcagccaactccaattttttttgcgctcctacggaagtcgggaagg

SEQ ID NO: 1481 - DNA, 104 bp, synthetic construct
  source 1..104: mol_type = other DNA
gtgagacgtagggatgttttagagctacctgaaggtaaagatcgggtcctcttttttttcagccaactccaattttttttgaggacccgatctttaccttcagg

SEQ ID NO: 1482 - DNA, 103 bp, synthetic construct
  source 1..103: mol_type = other DNA
gcgagtcttgccatgttttagagctacctgaaggtaaagatcgggtcctcttttttttcagccaactccaattttttttgaggacccgatctttaccttcagg

SEQ ID NO: 1483 - DNA, 103 bp, synthetic construct
  source 1..103: mol_type = other DNA
ggaccggacagggagttttagagctacctgaaggtaaagatcgggtcctcttttttttcagccaactccaattttttttgaggacccgatctttaccttcagg

SEQ ID NO: 1484 - DNA, 104 bp, synthetic construct
  source 1..104: mol_type = other DNA
gccgcccaatgaggggttttagagctacctgaaggtaaagatcgggtcctcttttttttcagccaactccaattttttttgaggacccgatctttaccttcagg

SEQ ID NO: 1485 - DNA, 102 bp, synthetic construct
  source 1..102: mol_type = other DNA
gtgagacgtagggatgttttagagctacctggttatagcggacgcactgtttttttttcagccaactccaattttttttacagtgcgtccgctataaccagg

SEQ ID NO: 1486 - DNA, 101 bp, synthetic construct
  source 1..101: mol_type = other DNA
gcgagtcttgccatgttttagagctacctggttatagcggacgcactgtttttttttcagccaactccaattttttttacagtgcgtccgctataaccagg

SEQ ID NO: 1487 - DNA, 101 bp, synthetic construct
  source 1..101: mol_type = other DNA
ggaccggacagggagttttagagctacctggttatagcggacgcactgtttttttttcagccaactccaattttttttacagtgcgtccgctataaccagg

SEQ ID NO: 1488 - DNA, 102 bp, synthetic construct
  source 1..102: mol_type = other DNA
gccgcccaatgaggggttttagagctacctggttatagcggacgcactgtttttttttcagccaactccaattttttttacagtgcgtccgctataaccagg

SEQ ID NO: 1489 - DNA, 102 bp, synthetic construct
  source 1..102: mol_type = other DNA
gtgagacgtagggatgttttagagctaccgcatcgtattatctgcgaagcttttttttcagccaactccaattttttttgcttcgcagataatacgatgcgg

SEQ ID NO: 1490 - DNA, 101 bp, synthetic construct
  source 1..101: mol_type = other DNA
gcgagtcttgccatgttttagagctaccgcatcgtattatctgcgaagcttttttttcagccaactccaattttttttgcttcgcagataatacgatgcgg

SEQ ID NO: 1491 - DNA, 101 bp, synthetic construct
  source 1..101: mol_type = other DNA
ggaccggacagggagttttagagctaccgcatcgtattatctgcgaagcttttttttcagccaactccaattttttttgcttcgcagataatacgatgcgg

SEQ ID NO: 1492 - DNA, 102 bp, synthetic construct
  source 1..102: mol_type = other DNA
gccgcccaatgaggggttttagagctaccgcatcgtattatctgcgaagcttttttttcagccaactccaattttttttgcttcgcagataatacgatgcgg

SEQ ID NO: 1493 - DNA, 102 bp, synthetic construct
  source 1..102: mol_type = other DNA
gtgagacgtagggatgttttagagctaccgctaggacgttcaacggagtcttttttttcagccaactccaattttttttgactccgttgaacgtcctagcgg

SEQ ID NO: 1494 - DNA, 101 bp, synthetic construct
  source 1..101: mol_type = other DNA
gcgagtcttgccatgttttagagctaccgctaggacgttcaacggagtcttttttttcagccaactccaattttttttgactccgttgaacgtcctagcgg

SEQ ID NO: 1495 - DNA, 101 bp, synthetic construct
  source 1..101: mol_type = other DNA
ggaccggacagggagttttagagctaccgctaggacgttcaacggagtcttttttttcagccaactccaattttttttgactccgttgaacgtcctagcgg

SEQ ID NO: 1496 - DNA, 102 bp, synthetic construct
  source 1..102: mol_type = other DNA
gccgcccaatgaggggttttagagctaccgctaggacgttcaacggagtcttttttttcagccaactccaattttttttgactccgttgaacgtcctagcgg

SEQ ID NO: 1497 - DNA, 102 bp, synthetic construct
  source 1..102: mol_type = other DNA
gtgagacgtagggatgttttagagctaccatagcggtactatcggcatctttttttttcagccaactccaattttttttagatgccgatagtaccgctatgg

SEQ ID NO: 1498 - DNA, 101 bp, synthetic construct
  source 1..101: mol_type = other DNA
gcgagtcttgccatgttttagagctaccatagcggtactatcggcatctttttttttcagccaactccaattttttttagatgccgatagtaccgctatgg

SEQ ID NO: 1499 - DNA, 101 bp, synthetic construct
  source 1..101: mol_type = other DNA
ggaccggacagggagttttagagctaccatagcggtactatcggcatctttttttttcagccaactccaattttttttagatgccgatagtaccgctatgg

SEQ ID NO: 1500 - DNA, 102 bp, synthetic construct
  source 1..102: mol_type = other DNA
gccgcccaatgaggggttttagagctaccatagcggtactatcggcatctttttttttcagccaactccaattttttttagatgccgatagtaccgctatgg

SEQ ID NO: 1501 - DNA, 102 bp, synthetic construct
  source 1..102: mol_type = other DNA
gtgagacgtagggatgttttagagctacctcgtactagtctcgcatgaccttttttttcagccaactccaattttttttggtcatgcgagactagtacgagg

SEQ ID NO: 1502 - DNA, 101 bp, synthetic construct
  source 1..101: mol_type = other DNA
gcgagtcttgccatgttttagagctacctcgtactagtctcgcatgaccttttttttcagccaactccaattttttttggtcatgcgagactagtacgagg

SEQ ID NO: 1503 - DNA, 101 bp, synthetic construct
  source 1..101: mol_type = other DNA
ggaccggacagggagttttagagctacctcgtactagtctcgcatgaccttttttttcagccaactccaattttttttggtcatgcgagactagtacgagg

SEQ ID NO: 1504 - DNA, 102 bp, synthetic construct
  source 1..102: mol_type = other DNA
gccgcccaatgaggggttttagagctacctcgtactagtctcgcatgaccttttttttcagccaactccaattttttttggtcatgcgagactagtacgagg

SEQ ID NO: 1505 - DNA, 102 bp, synthetic construct
  source 1..102: mol_type = other DNA
gtgagacgtagggatgttttagagctaccgatagtgctaaacgacgctttttttttttcagccaactccaattttttttaaagcgtcgtttagcactatcgg

SEQ ID NO: 1506 - DNA, 101 bp, synthetic construct
  source 1..101: mol_type = other DNA
gcgagtcttgccatgttttagagctaccgatagtgctaaacgacgctttttttttttcagccaactccaattttttttaaagcgtcgtttagcactatcgg

SEQ ID NO: 1507 - DNA, 101 bp, synthetic construct
  source 1..101: mol_type = other DNA
ggaccggacagggagttttagagctaccgatagtgctaaacgacgctttttttttttcagccaactccaattttttttaaagcgtcgtttagcactatcgg

SEQ ID NO: 1508 - DNA, 102 bp, synthetic construct
  source 1..102: mol_type = other DNA
gccgcccaatgaggggttttagagctaccgatagtgctaaacgacgctttttttttttcagccaactccaattttttttaaagcgtcgtttagcactatcgg

SEQ ID NO: 1509 - DNA, 102 bp, synthetic construct
  source 1..102: mol_type = other DNA
gtgagacgtagggatgttttagagctacccgttatcgacgttcaaggaacttttttttcagccaactccaattttttttgttccttgaacgtcgataacggg

SEQ ID NO: 1510 - DNA, 101 bp, synthetic construct
  source 1..101: mol_type = other DNA
gcgagtcttgccatgttttagagctacccgttatcgacgttcaaggaacttttttttcagccaactccaattttttttgttccttgaacgtcgataacggg

SEQ ID NO: 1511 - DNA, 101 bp, synthetic construct
  source 1..101: mol_type = other DNA
ggaccggacagggagttttagagctacccgttatcgacgttcaaggaacttttttttcagccaactccaattttttttgttccttgaacgtcgataacggg

SEQ ID NO: 1512 - DNA, 102 bp, synthetic construct
  source 1..102: mol_type = other DNA
gccgcccaatgaggggttttagagctacccgttatcgacgttcaaggaacttttttttcagccaactccaattttttttgttccttgaacgtcgataacggg

SEQ ID NO: 1513 - DNA, 102 bp, synthetic construct
  source 1..102: mol_type = other DNA
gtgagacgtagggatgttttagagctaccgatcaatgcggtctgcgtaacttttttttcagccaactccaattttttttgttacgcagaccgcattgatcgg

SEQ ID NO: 1514 - DNA, 101 bp, synthetic construct
  source 1..101: mol_type = other DNA
gcgagtcttgccatgttttagagctaccgatcaatgcggtctgcgtaacttttttttcagccaactccaattttttttgttacgcagaccgcattgatcgg

SEQ ID NO: 1515 - DNA, 101 bp, synthetic construct
  source 1..101: mol_type = other DNA
ggaccggacagggagttttagagctaccgatcaatgcggtctgcgtaacttttttttcagccaactccaattttttttgttacgcagaccgcattgatcgg

SEQ ID NO: 1516 - DNA, 102 bp, synthetic construct
  source 1..102: mol_type = other DNA
gccgcccaatgaggggttttagagctaccgatcaatgcggtctgcgtaacttttttttcagccaactccaattttttttgttacgcagaccgcattgatcgg

SEQ ID NO: 1517 - DNA, 102 bp, synthetic construct
  source 1..102: mol_type = other DNA
gtgagacgtagggatgttttagagctacccttactcgcgatactctcgacttttttttcagccaactccaattttttttgtcgagagtatcgcgagtaaggg

SEQ ID NO: 1518 - DNA, 101 bp, synthetic construct
  source 1..101: mol_type = other DNA
gcgagtcttgccatgttttagagctacccttactcgcgatactctcgacttttttttcagccaactccaattttttttgtcgagagtatcgcgagtaaggg

SEQ ID NO: 1519 - DNA, 101 bp, synthetic construct
  source 1..101: mol_type = other DNA
ggaccggacagggagttttagagctacccttactcgcgatactctcgacttttttttcagccaactccaattttttttgtcgagagtatcgcgagtaaggg

SEQ ID NO: 1520 - DNA, 102 bp, synthetic construct
  source 1..102: mol_type = other DNA
gccgcccaatgaggggttttagagctacccttactcgcgatactctcgacttttttttcagccaactccaattttttttgtcgagagtatcgcgagtaaggg

SEQ ID NO: 1521 - DNA, 102 bp, synthetic construct
  source 1..102: mol_type = other DNA
gtgagacgtagggatgttttagagctaccgcggacggtaagcacggaatattttttttcagccaactccaatttttttttattccgtgcttaccgtccgcgg

SEQ ID NO: 1522 - DNA, 101 bp, synthetic construct
  source 1..101: mol_type = other DNA
gcgagtcttgccatgttttagagctaccgcggacggtaagcacggaatattttttttcagccaactccaatttttttttattccgtgcttaccgtccgcgg

SEQ ID NO: 1523 - DNA, 101 bp, synthetic construct
  source 1..101: mol_type = other DNA
ggaccggacagggagttttagagctaccgcggacggtaagcacggaatattttttttcagccaactccaatttttttttattccgtgcttaccgtccgcgg

SEQ ID NO: 1524 - DNA, 102 bp, synthetic construct
  source 1..102: mol_type = other DNA
gccgcccaatgaggggttttagagctaccgcggacggtaagcacggaatattttttttcagccaactccaatttttttttattccgtgcttaccgtccgcgg

SEQ ID NO: 1525 - DNA, 102 bp, synthetic construct
  source 1..102: mol_type = other DNA
gtgagacgtagggatgttttagagctacctatagtcacgaatcgtagggtttttttttcagccaactccaattttttttaccctacgattcgtgactatagg

SEQ ID NO: 1526 - DNA, 101 bp, synthetic construct
  source 1..101: mol_type = other DNA
gcgagtcttgccatgttttagagctacctatagtcacgaatcgtagggtttttttttcagccaactccaattttttttaccctacgattcgtgactatagg

SEQ ID NO: 1527 - DNA, 101 bp, synthetic construct
  source 1..101: mol_type = other DNA
ggaccggacagggagttttagagctacctatagtcacgaatcgtagggtttttttttcagccaactccaattttttttaccctacgattcgtgactatagg

SEQ ID NO: 1528 - DNA, 102 bp, synthetic construct
  source 1..102: mol_type = other DNA
gccgcccaatgaggggttttagagctacctatagtcacgaatcgtagggtttttttttcagccaactccaattttttttaccctacgattcgtgactatagg

SEQ ID NO: 1529 - DNA, 102 bp, synthetic construct
  source 1..102: mol_type = other DNA
gtgagacgtagggatgttttagagctacccgtcgtcacgtatgcgtagcattttttttcagccaactccaatttttttttgctacgcatacgtgacgacggg

SEQ ID NO: 1530 - DNA, 101 bp, synthetic construct
  source 1..101: mol_type = other DNA
gcgagtcttgccatgttttagagctacccgtcgtcacgtatgcgtagcattttttttcagccaactccaatttttttttgctacgcatacgtgacgacggg

SEQ ID NO: 1531 - DNA, 101 bp, synthetic construct
  source 1..101: mol_type = other DNA
ggaccggacagggagttttagagctacccgtcgtcacgtatgcgtagcattttttttcagccaactccaatttttttttgctacgcatacgtgacgacggg

SEQ ID NO: 1532 - DNA, 102 bp, synthetic construct
  source 1..102: mol_type = other DNA
gccgcccaatgaggggttttagagctacccgtcgtcacgtatgcgtagcattttttttcagccaactccaatttttttttgctacgcatacgtgacgacggg

SEQ ID NO: 1533 - DNA, 102 bp, synthetic construct
  source 1..102: mol_type = other DNA
gtgagacgtagggatgttttagagctacccgagaggtagtagacgacgcattttttttcagccaactccaatttttttttgcgtcgtctactacctctcggg

SEQ ID NO: 1534 - DNA, 101 bp, synthetic construct
  source 1..101: mol_type = other DNA
gcgagtcttgccatgttttagagctacccgagaggtagtagacgacgcattttttttcagccaactccaatttttttttgcgtcgtctactacctctcggg

SEQ ID NO: 1535 - DNA, 101 bp, synthetic construct
  source 1..101: mol_type = other DNA
ggaccggacagggagttttagagctacccgagaggtagtagacgacgcattttttttcagccaactccaatttttttttgcgtcgtctactacctctcggg

SEQ ID NO: 1536 - DNA, 102 bp, synthetic construct
  source 1..102: mol_type = other DNA
gccgcccaatgaggggttttagagctacccgagaggtagtagacgacgcattttttttcagccaactccaatttttttttgcgtcgtctactacctctcggg

SEQ ID NO: 1537 - DNA, 102 bp, synthetic construct
  source 1..102: mol_type = other DNA
gtgagacgtagggatgttttagagctaccgacgtctacggacgggagctattttttttcagccaactccaatttttttttagctcccgtccgtagacgtcgg

SEQ ID NO: 1538 - DNA, 101 bp, synthetic construct
  source 1..101: mol_type = other DNA
gcgagtcttgccatgttttagagctaccgacgtctacggacgggagctattttttttcagccaactccaatttttttttagctcccgtccgtagacgtcgg

SEQ ID NO: 1539 - DNA, 101 bp, synthetic construct
  source 1..101: mol_type = other DNA
ggaccggacagggagttttagagctaccgacgtctacggacgggagctattttttttcagccaactccaatttttttttagctcccgtccgtagacgtcgg

SEQ ID NO: 1540 - DNA, 102 bp, synthetic construct
  source 1..102: mol_type = other DNA
gccgcccaatgaggggttttagagctaccgacgtctacggacgggagctattttttttcagccaactccaatttttttttagctcccgtccgtagacgtcgg

SEQ ID NO: 1541 - DNA, 102 bp, synthetic construct
  source 1..102: mol_type = other DNA
gtgagacgtagggatgttttagagctaccaaagctcattcgcgactgagcttttttttcagccaactccaattttttttgctcagtcgcgaatgagctttgg

SEQ ID NO: 1542 - DNA, 101 bp, synthetic construct
  source 1..101: mol_type = other DNA
gcgagtcttgccatgttttagagctaccaaagctcattcgcgactgagcttttttttcagccaactccaattttttttgctcagtcgcgaatgagctttgg

SEQ ID NO: 1543 - DNA, 101 bp, synthetic construct
  source 1..101: mol_type = other DNA
ggaccggacagggagttttagagctaccaaagctcattcgcgactgagcttttttttcagccaactccaattttttttgctcagtcgcgaatgagctttgg

SEQ ID NO: 1544 - DNA, 102 bp, synthetic construct
  source 1..102: mol_type = other DNA
gccgcccaatgaggggttttagagctaccaaagctcattcgcgactgagcttttttttcagccaactccaattttttttgctcagtcgcgaatgagctttgg

SEQ ID NO: 1545 - DNA, 102 bp, synthetic construct
  source 1..102: mol_type = other DNA
gtgagacgtagggatgttttagagctaccatggcacgatcgacacggaggttttttttcagccaactccaattttttttcctccgtgtcgatcgtgccatgg

SEQ ID NO: 1546 - DNA, 101 bp, synthetic construct
  source 1..101: mol_type = other DNA
gcgagtcttgccatgttttagagctaccatggcacgatcgacacggaggttttttttcagccaactccaattttttttcctccgtgtcgatcgtgccatgg

SEQ ID NO: 1547 - DNA, 101 bp, synthetic construct
  source 1..101: mol_type = other DNA
ggaccggacagggagttttagagctaccatggcacgatcgacacggaggttttttttcagccaactccaattttttttcctccgtgtcgatcgtgccatgg

SEQ ID NO: 1548 - DNA, 102 bp, synthetic construct
  source 1..102: mol_type = other DNA
gccgcccaatgaggggttttagagctaccatggcacgatcgacacggaggttttttttcagccaactccaattttttttcctccgtgtcgatcgtgccatgg

SEQ ID NO: 1549 - DNA, 102 bp, synthetic construct
  source 1..102: mol_type = other DNA
gtgagacgtagggatgttttagagctacccgaactctctatcgaacgagtttttttttcagccaactccaattttttttactcgttcgatagagagttcggg

SEQ ID NO: 1550 - DNA, 101 bp, synthetic construct
  source 1..101: mol_type = other DNA
gcgagtcttgccatgttttagagctacccgaactctctatcgaacgagtttttttttcagccaactccaattttttttactcgttcgatagagagttcggg

SEQ ID NO: 1551 - DNA, 101 bp, synthetic construct
  source 1..101: mol_type = other DNA
ggaccggacagggagttttagagctacccgaactctctatcgaacgagtttttttttcagccaactccaattttttttactcgttcgatagagagttcggg

SEQ ID NO: 1552 - DNA, 102 bp, synthetic construct
  source 1..102: mol_type = other DNA
gccgcccaatgaggggttttagagctacccgaactctctatcgaacgagtttttttttcagccaactccaattttttttactcgttcgatagagagttcggg

SEQ ID NO: 1553 - DNA, 102 bp, synthetic construct
  source 1..102: mol_type = other DNA
gtgagacgtagggatgttttagagctacctacacgatagtggtcgtgcgcttttttttcagccaactccaattttttttgcgcacgaccactatcgtgtagg

SEQ ID NO: 1554 - DNA, 101 bp, synthetic construct
  source 1..101: mol_type = other DNA
gcgagtcttgccatgttttagagctacctacacgatagtggtcgtgcgcttttttttcagccaactccaattttttttgcgcacgaccactatcgtgtagg

SEQ ID NO: 1555 - DNA, 101 bp, synthetic construct
  source 1..101: mol_type = other DNA
ggaccggacagggagttttagagctacctacacgatagtggtcgtgcgcttttttttcagccaactccaattttttttgcgcacgaccactatcgtgtagg

SEQ ID NO: 1556 - DNA, 102 bp, synthetic construct
  source 1..102: mol_type = other DNA
gccgcccaatgaggggttttagagctacctacacgatagtggtcgtgcgcttttttttcagccaactccaattttttttgcgcacgaccactatcgtgtagg

SEQ ID NO: 1557 - DNA, 102 bp, synthetic construct
  source 1..102: mol_type = other DNA
gtgagacgtagggatgttttagagctaccctggcggaacgttcgagtaatttttttttcagccaactccaattttttttattactcgaacgttccgccaggg

SEQ ID NO: 1558 - DNA, 101 bp, synthetic construct
  source 1..101: mol_type = other DNA
gcgagtcttgccatgttttagagctaccctggcggaacgttcgagtaatttttttttcagccaactccaattttttttattactcgaacgttccgccaggg

SEQ ID NO: 1559 - DNA, 101 bp, synthetic construct
  source 1..101: mol_type = other DNA
ggaccggacagggagttttagagctaccctggcggaacgttcgagtaatttttttttcagccaactccaattttttttattactcgaacgttccgccaggg

SEQ ID NO: 1560 - DNA, 102 bp, synthetic construct
  source 1..102: mol_type = other DNA
gccgcccaatgaggggttttagagctaccctggcggaacgttcgagtaatttttttttcagccaactccaattttttttattactcgaacgttccgccaggg

SEQ ID NO: 1561 - DNA, 102 bp, synthetic construct
  source 1..102: mol_type = other DNA
gtgagacgtagggatgttttagagctacctacactcgacatcggtagctattttttttcagccaactccaatttttttttagctaccgatgtcgagtgtagg

SEQ ID NO: 1562 - DNA, 101 bp, synthetic construct
  source 1..101: mol_type = other DNA
gcgagtcttgccatgttttagagctacctacactcgacatcggtagctattttttttcagccaactccaatttttttttagctaccgatgtcgagtgtagg

SEQ ID NO: 1563 - DNA, 101 bp, synthetic construct
  source 1..101: mol_type = other DNA
ggaccggacagggagttttagagctacctacactcgacatcggtagctattttttttcagccaactccaatttttttttagctaccgatgtcgagtgtagg

SEQ ID NO: 1564 - DNA, 102 bp, synthetic construct
  source 1..102: mol_type = other DNA
gccgcccaatgaggggttttagagctacctacactcgacatcggtagctattttttttcagccaactccaatttttttttagctaccgatgtcgagtgtagg

SEQ ID NO: 1565 - DNA, 104 bp, synthetic construct
  source 1..104: mol_type = other DNA
gaaaagttcggatctgttttagagctaccgtcgttgtaccgtctacttgacttttttttcagccaactccaattttttttgtcaagtagacggtacaacgacgg

SEQ ID NO: 1566 - DNA, 103 bp, synthetic construct
  source 1..103: mol_type = other DNA
gtcgccattggccagttttagagctaccgtcgttgtaccgtctacttgacttttttttcagccaactccaattttttttgtcaagtagacggtacaacgacgg

SEQ ID NO: 1567 - DNA, 104 bp, synthetic construct
  source 1..104: mol_type = other DNA
gctccctcgcctatagttttagagctaccgtcgttgtaccgtctacttgacttttttttcagccaactccaattttttttgtcaagtagacggtacaacgacgg

SEQ ID NO: 1568 - DNA, 103 bp, synthetic construct
  source 1..103: mol_type = other DNA
ggcccgggagccgggttttagagctaccgtcgttgtaccgtctacttgacttttttttcagccaactccaattttttttgtcaagtagacggtacaacgacgg

SEQ ID NO: 1569 - DNA, 104 bp, synthetic construct
  source 1..104: mol_type = other DNA
gaaaagttcggatctgttttagagctaccttcccgacttccgtaggagcgcttttttttcagccaactccaattttttttgcgctcctacggaagtcgggaagg

SEQ ID NO: 1570 - DNA, 103 bp, synthetic construct
  source 1..103: mol_type = other DNA
gtcgccattggccagttttagagctaccttcccgacttccgtaggagcgcttttttttcagccaactccaattttttttgcgctcctacggaagtcgggaagg

SEQ ID NO: 1571 - DNA, 104 bp, synthetic construct
  source 1..104: mol_type = other DNA
gctccctcgcctatagttttagagctaccttcccgacttccgtaggagcgcttttttttcagccaactccaattttttttgcgctcctacggaagtcgggaagg

SEQ ID NO: 1572 - DNA, 103 bp, synthetic construct
  source 1..103: mol_type = other DNA
ggcccgggagccgggttttagagctaccttcccgacttccgtaggagcgcttttttttcagccaactccaattttttttgcgctcctacggaagtcgggaagg

SEQ ID NO: 1573 - DNA, 104 bp, synthetic construct
  source 1..104: mol_type = other DNA
gaaaagttcggatctgttttagagctacctgaaggtaaagatcgggtcctcttttttttcagccaactccaattttttttgaggacccgatctttaccttcagg

SEQ ID NO: 1574 - DNA, 103 bp, synthetic construct
  source 1..103: mol_type = other DNA
gtcgccattggccagttttagagctacctgaaggtaaagatcgggtcctcttttttttcagccaactccaattttttttgaggacccgatctttaccttcagg

SEQ ID NO: 1575 - DNA, 104 bp, synthetic construct
  source 1..104: mol_type = other DNA
gctccctcgcctatagttttagagctacctgaaggtaaagatcgggtcctcttttttttcagccaactccaattttttttgaggacccgatctttaccttcagg

SEQ ID NO: 1576 - DNA, 103 bp, synthetic construct
  source 1..103: mol_type = other DNA
ggcccgggagccgggttttagagctacctgaaggtaaagatcgggtcctcttttttttcagccaactccaattttttttgaggacccgatctttaccttcagg

SEQ ID NO: 1577 - DNA, 102 bp, synthetic construct
  source 1..102: mol_type = other DNA
gaaaagttcggatctgttttagagctacctggttatagcggacgcactgtttttttttcagccaactccaattttttttacagtgcgtccgctataaccagg

SEQ ID NO: 1578 - DNA, 101 bp, synthetic construct
  source 1..101: mol_type = other DNA
gtcgccattggccagttttagagctacctggttatagcggacgcactgtttttttttcagccaactccaattttttttacagtgcgtccgctataaccagg

SEQ ID NO: 1579 - DNA, 102 bp, synthetic construct
  source 1..102: mol_type = other DNA
gctccctcgcctatagttttagagctacctggttatagcggacgcactgtttttttttcagccaactccaattttttttacagtgcgtccgctataaccagg

SEQ ID NO: 1580 - DNA, 101 bp, synthetic construct
  source 1..101: mol_type = other DNA
ggcccgggagccgggttttagagctacctggttatagcggacgcactgtttttttttcagccaactccaattttttttacagtgcgtccgctataaccagg

SEQ ID NO: 1581 - DNA, 102 bp, synthetic construct
  source 1..102: mol_type = other DNA
gaaaagttcggatctgttttagagctaccgcatcgtattatctgcgaagcttttttttcagccaactccaattttttttgcttcgcagataatacgatgcgg

SEQ ID NO: 1582 - DNA, 101 bp, synthetic construct
  source 1..101: mol_type = other DNA
gtcgccattggccagttttagagctaccgcatcgtattatctgcgaagcttttttttcagccaactccaattttttttgcttcgcagataatacgatgcgg

SEQ ID NO: 1583 - DNA, 102 bp, synthetic construct
  source 1..102: mol_type = other DNA
gctccctcgcctatagttttagagctaccgcatcgtattatctgcgaagcttttttttcagccaactccaattttttttgcttcgcagataatacgatgcgg

SEQ ID NO: 1584 - DNA, 101 bp, synthetic construct
  source 1..101: mol_type = other DNA
ggcccgggagccgggttttagagctaccgcatcgtattatctgcgaagcttttttttcagccaactccaattttttttgcttcgcagataatacgatgcgg

SEQ ID NO: 1585 - DNA, 102 bp, synthetic construct
  source 1..102: mol_type = other DNA
gaaaagttcggatctgttttagagctaccgctaggacgttcaacggagtcttttttttcagccaactccaattttttttgactccgttgaacgtcctagcgg

SEQ ID NO: 1586 - DNA, 101 bp, synthetic construct
  source 1..101: mol_type = other DNA
gtcgccattggccagttttagagctaccgctaggacgttcaacggagtcttttttttcagccaactccaattttttttgactccgttgaacgtcctagcgg

SEQ ID NO: 1587 - DNA, 102 bp, synthetic construct
  source 1..102: mol_type = other DNA
gctccctcgcctatagttttagagctaccgctaggacgttcaacggagtcttttttttcagccaactccaattttttttgactccgttgaacgtcctagcgg

SEQ ID NO: 1588 - DNA, 101 bp, synthetic construct
  source 1..101: mol_type = other DNA
ggcccgggagccgggttttagagctaccgctaggacgttcaacggagtcttttttttcagccaactccaattttttttgactccgttgaacgtcctagcgg

SEQ ID NO: 1589 - DNA, 102 bp, synthetic construct
  source 1..102: mol_type = other DNA
gaaaagttcggatctgttttagagctaccatagcggtactatcggcatctttttttttcagccaactccaattttttttagatgccgatagtaccgctatgg

SEQ ID NO: 1590 - DNA, 101 bp, synthetic construct
  source 1..101: mol_type = other DNA
gtcgccattggccagttttagagctaccatagcggtactatcggcatctttttttttcagccaactccaattttttttagatgccgatagtaccgctatgg

SEQ ID NO: 1591 - DNA, 102 bp, synthetic construct
  source 1..102: mol_type = other DNA
gctccctcgcctatagttttagagctaccatagcggtactatcggcatctttttttttcagccaactccaattttttttagatgccgatagtaccgctatgg

SEQ ID NO: 1592 - DNA, 101 bp, synthetic construct
  source 1..101: mol_type = other DNA
ggcccgggagccgggttttagagctaccatagcggtactatcggcatctttttttttcagccaactccaattttttttagatgccgatagtaccgctatgg

SEQ ID NO: 1593 - DNA, 102 bp, synthetic construct
  source 1..102: mol_type = other DNA
gaaaagttcggatctgttttagagctacctcgtactagtctcgcatgaccttttttttcagccaactccaattttttttggtcatgcgagactagtacgagg

SEQ ID NO: 1594 - DNA, 101 bp, synthetic construct
  source 1..101: mol_type = other DNA
gtcgccattggccagttttagagctacctcgtactagtctcgcatgaccttttttttcagccaactccaattttttttggtcatgcgagactagtacgagg

SEQ ID NO: 1595 - DNA, 102 bp, synthetic construct
  source 1..102: mol_type = other DNA
gctccctcgcctatagttttagagctacctcgtactagtctcgcatgaccttttttttcagccaactccaattttttttggtcatgcgagactagtacgagg

SEQ ID NO: 1596 - DNA, 101 bp, synthetic construct
  source 1..101: mol_type = other DNA
ggcccgggagccgggttttagagctacctcgtactagtctcgcatgaccttttttttcagccaactccaattttttttggtcatgcgagactagtacgagg

SEQ ID NO: 1597 - DNA, 102 bp, synthetic construct
  source 1..102: mol_type = other DNA
gaaaagttcggatctgttttagagctaccgatagtgctaaacgacgctttttttttttcagccaactccaattttttttaaagcgtcgtttagcactatcgg

SEQ ID NO: 1598 - DNA, 101 bp, synthetic construct
  source 1..101: mol_type = other DNA
gtcgccattggccagttttagagctaccgatagtgctaaacgacgctttttttttttcagccaactccaattttttttaaagcgtcgtttagcactatcgg

SEQ ID NO: 1599 - DNA, 102 bp, synthetic construct
  source 1..102: mol_type = other DNA
gctccctcgcctatagttttagagctaccgatagtgctaaacgacgctttttttttttcagccaactccaattttttttaaagcgtcgtttagcactatcgg

SEQ ID NO: 1600 - DNA, 101 bp, synthetic construct
  source 1..101: mol_type = other DNA
ggcccgggagccgggttttagagctaccgatagtgctaaacgacgctttttttttttcagccaactccaattttttttaaagcgtcgtttagcactatcgg

SEQ ID NO: 1601 - DNA, 102 bp, synthetic construct
  source 1..102: mol_type = other DNA
gaaaagttcggatctgttttagagctacccgttatcgacgttcaaggaacttttttttcagccaactccaattttttttgttccttgaacgtcgataacggg

SEQ ID NO: 1602 - DNA, 101 bp, synthetic construct
  source 1..101: mol_type = other DNA
gtcgccattggccagttttagagctacccgttatcgacgttcaaggaacttttttttcagccaactccaattttttttgttccttgaacgtcgataacggg

SEQ ID NO: 1603 - DNA, 102 bp, synthetic construct
  source 1..102: mol_type = other DNA
gctccctcgcctatagttttagagctacccgttatcgacgttcaaggaacttttttttcagccaactccaattttttttgttccttgaacgtcgataacggg

SEQ ID NO: 1604 - DNA, 101 bp, synthetic construct
  source 1..101: mol_type = other DNA
ggcccgggagccgggttttagagctacccgttatcgacgttcaaggaacttttttttcagccaactccaattttttttgttccttgaacgtcgataacggg

SEQ ID NO: 1605 - DNA, 102 bp, synthetic construct
  source 1..102: mol_type = other DNA
gaaaagttcggatctgttttagagctaccgatcaatgcggtctgcgtaacttttttttcagccaactccaattttttttgttacgcagaccgcattgatcgg

SEQ ID NO: 1606 - DNA, 101 bp, synthetic construct
  source 1..101: mol_type = other DNA
gtcgccattggccagttttagagctaccgatcaatgcggtctgcgtaacttttttttcagccaactccaattttttttgttacgcagaccgcattgatcgg

SEQ ID NO: 1607 - DNA, 102 bp, synthetic construct
  source 1..102: mol_type = other DNA
gctccctcgcctatagttttagagctaccgatcaatgcggtctgcgtaacttttttttcagccaactccaattttttttgttacgcagaccgcattgatcgg

SEQ ID NO: 1608 - DNA, 101 bp, synthetic construct
  source 1..101: mol_type = other DNA
ggcccgggagccgggttttagagctaccgatcaatgcggtctgcgtaacttttttttcagccaactccaattttttttgttacgcagaccgcattgatcgg

SEQ ID NO: 1609 - DNA, 102 bp, synthetic construct
  source 1..102: mol_type = other DNA
gaaaagttcggatctgttttagagctacccttactcgcgatactctcgacttttttttcagccaactccaattttttttgtcgagagtatcgcgagtaaggg

SEQ ID NO: 1610 - DNA, 101 bp, synthetic construct
  source 1..101: mol_type = other DNA
gtcgccattggccagttttagagctacccttactcgcgatactctcgacttttttttcagccaactccaattttttttgtcgagagtatcgcgagtaaggg

SEQ ID NO: 1611 - DNA, 102 bp, synthetic construct
  source 1..102: mol_type = other DNA
gctccctcgcctatagttttagagctacccttactcgcgatactctcgacttttttttcagccaactccaattttttttgtcgagagtatcgcgagtaaggg

SEQ ID NO: 1612 - DNA, 101 bp, synthetic construct
  source 1..101: mol_type = other DNA
ggcccgggagccgggttttagagctacccttactcgcgatactctcgacttttttttcagccaactccaattttttttgtcgagagtatcgcgagtaaggg

SEQ ID NO: 1613 - DNA, 102 bp, synthetic construct
  source 1..102: mol_type = other DNA
gaaaagttcggatctgttttagagctaccgcggacggtaagcacggaatattttttttcagccaactccaatttttttttattccgtgcttaccgtccgcgg

SEQ ID NO: 1614 - DNA, 101 bp, synthetic construct
  source 1..101: mol_type = other DNA
gtcgccattggccagttttagagctaccgcggacggtaagcacggaatattttttttcagccaactccaatttttttttattccgtgcttaccgtccgcgg

SEQ ID NO: 1615 - DNA, 102 bp, synthetic construct
  source 1..102: mol_type = other DNA
gctccctcgcctatagttttagagctaccgcggacggtaagcacggaatattttttttcagccaactccaatttttttttattccgtgcttaccgtccgcgg

SEQ ID NO: 1616 - DNA, 101 bp, synthetic construct
  source 1..101: mol_type = other DNA
ggcccgggagccgggttttagagctaccgcggacggtaagcacggaatattttttttcagccaactccaatttttttttattccgtgcttaccgtccgcgg

SEQ ID NO: 1617 - DNA, 102 bp, synthetic construct
  source 1..102: mol_type = other DNA
gaaaagttcggatctgttttagagctacctatagtcacgaatcgtagggtttttttttcagccaactccaattttttttaccctacgattcgtgactatagg

SEQ ID NO: 1618 - DNA, 101 bp, synthetic construct
  source 1..101: mol_type = other DNA
gtcgccattggccagttttagagctacctatagtcacgaatcgtagggtttttttttcagccaactccaattttttttaccctacgattcgtgactatagg

SEQ ID NO: 1619 - DNA, 102 bp, synthetic construct
  source 1..102: mol_type = other DNA
gctccctcgcctatagttttagagctacctatagtcacgaatcgtagggtttttttttcagccaactccaattttttttaccctacgattcgtgactatagg

SEQ ID NO: 1620 - DNA, 101 bp, synthetic construct
  source 1..101: mol_type = other DNA
ggcccgggagccgggttttagagctacctatagtcacgaatcgtagggtttttttttcagccaactccaattttttttaccctacgattcgtgactatagg

SEQ ID NO: 1621 - DNA, 102 bp, synthetic construct
  source 1..102: mol_type = other DNA
gaaaagttcggatctgttttagagctacccgtcgtcacgtatgcgtagcattttttttcagccaactccaatttttttttgctacgcatacgtgacgacggg

SEQ ID NO: 1622 - DNA, 101 bp, synthetic construct
  source 1..101: mol_type = other DNA
gtcgccattggccagttttagagctacccgtcgtcacgtatgcgtagcattttttttcagccaactccaatttttttttgctacgcatacgtgacgacggg

SEQ ID NO: 1623 - DNA, 102 bp, synthetic construct
  source 1..102: mol_type = other DNA
gctccctcgcctatagttttagagctacccgtcgtcacgtatgcgtagcattttttttcagccaactccaatttttttttgctacgcatacgtgacgacggg

SEQ ID NO: 1624 - DNA, 101 bp, synthetic construct
  source 1..101: mol_type = other DNA
ggcccgggagccgggttttagagctacccgtcgtcacgtatgcgtagcattttttttcagccaactccaatttttttttgctacgcatacgtgacgacggg

SEQ ID NO: 1625 - DNA, 102 bp, synthetic construct
  source 1..102: mol_type = other DNA
gaaaagttcggatctgttttagagctacccgagaggtagtagacgacgcattttttttcagccaactccaatttttttttgcgtcgtctactacctctcggg

SEQ ID NO: 1626 - DNA, 101 bp, synthetic construct
  source 1..101: mol_type = other DNA
gtcgccattggccagttttagagctacccgagaggtagtagacgacgcattttttttcagccaactccaatttttttttgcgtcgtctactacctctcggg

SEQ ID NO: 1627 - DNA, 102 bp, synthetic construct
  source 1..102: mol_type = other DNA
gctccctcgcctatagttttagagctacccgagaggtagtagacgacgcattttttttcagccaactccaatttttttttgcgtcgtctactacctctcggg

SEQ ID NO: 1628 - DNA, 101 bp, synthetic construct
  source 1..101: mol_type = other DNA
ggcccgggagccgggttttagagctacccgagaggtagtagacgacgcattttttttcagccaactccaatttttttttgcgtcgtctactacctctcggg

SEQ ID NO: 1629 - DNA, 102 bp, synthetic construct
  source 1..102: mol_type = other DNA
gaaaagttcggatctgttttagagctaccgacgtctacggacgggagctattttttttcagccaactccaatttttttttagctcccgtccgtagacgtcgg

SEQ ID NO: 1630 - DNA, 101 bp, synthetic construct
  source 1..101: mol_type = other DNA
gtcgccattggccagttttagagctaccgacgtctacggacgggagctattttttttcagccaactccaatttttttttagctcccgtccgtagacgtcgg

SEQ ID NO: 1631 - DNA, 102 bp, synthetic construct
  source 1..102: mol_type = other DNA
gctccctcgcctatagttttagagctaccgacgtctacggacgggagctattttttttcagccaactccaatttttttttagctcccgtccgtagacgtcgg

SEQ ID NO: 1632 - DNA, 101 bp, synthetic construct
  source 1..101: mol_type = other DNA
ggcccgggagccgggttttagagctaccgacgtctacggacgggagctattttttttcagccaactccaatttttttttagctcccgtccgtagacgtcgg

SEQ ID NO: 1633 - DNA, 102 bp, synthetic construct
  source 1..102: mol_type = other DNA
gaaaagttcggatctgttttagagctaccaaagctcattcgcgactgagcttttttttcagccaactccaattttttttgctcagtcgcgaatgagctttgg

SEQ ID NO: 1634 - DNA, 101 bp, synthetic construct
  source 1..101: mol_type = other DNA
gtcgccattggccagttttagagctaccaaagctcattcgcgactgagcttttttttcagccaactccaattttttttgctcagtcgcgaatgagctttgg

SEQ ID NO: 1635 - DNA, 102 bp, synthetic construct
  source 1..102: mol_type = other DNA
gctccctcgcctatagttttagagctaccaaagctcattcgcgactgagcttttttttcagccaactccaattttttttgctcagtcgcgaatgagctttgg

SEQ ID NO: 1636 - DNA, 101 bp, synthetic construct
  source 1..101: mol_type = other DNA
ggcccgggagccgggttttagagctaccaaagctcattcgcgactgagcttttttttcagccaactccaattttttttgctcagtcgcgaatgagctttgg

SEQ ID NO: 1637 - DNA, 102 bp, synthetic construct
  source 1..102: mol_type = other DNA
gaaaagttcggatctgttttagagctaccatggcacgatcgacacggaggttttttttcagccaactccaattttttttcctccgtgtcgatcgtgccatgg

SEQ ID NO: 1638 - DNA, 101 bp, synthetic construct
  source 1..101: mol_type = other DNA
gtcgccattggccagttttagagctaccatggcacgatcgacacggaggttttttttcagccaactccaattttttttcctccgtgtcgatcgtgccatgg

SEQ ID NO: 1639 - DNA, 102 bp, synthetic construct
  source 1..102: mol_type = other DNA
gctccctcgcctatagttttagagctaccatggcacgatcgacacggaggttttttttcagccaactccaattttttttcctccgtgtcgatcgtgccatgg

SEQ ID NO: 1640 - DNA, 101 bp, synthetic construct
  source 1..101: mol_type = other DNA
ggcccgggagccgggttttagagctaccatggcacgatcgacacggaggttttttttcagccaactccaattttttttcctccgtgtcgatcgtgccatgg

SEQ ID NO: 1641 - DNA, 102 bp, synthetic construct
  source 1..102: mol_type = other DNA
gaaaagttcggatctgttttagagctacccgaactctctatcgaacgagtttttttttcagccaactccaattttttttactcgttcgatagagagttcggg

SEQ ID NO: 1642 - DNA, 101 bp, synthetic construct
  source 1..101: mol_type = other DNA
gtcgccattggccagttttagagctacccgaactctctatcgaacgagtttttttttcagccaactccaattttttttactcgttcgatagagagttcggg

SEQ ID NO: 1643 - DNA, 102 bp, synthetic construct
  source 1..102: mol_type = other DNA
gctccctcgcctatagttttagagctacccgaactctctatcgaacgagtttttttttcagccaactccaattttttttactcgttcgatagagagttcggg

SEQ ID NO: 1644 - DNA, 101 bp, synthetic construct
  source 1..101: mol_type = other DNA
ggcccgggagccgggttttagagctacccgaactctctatcgaacgagtttttttttcagccaactccaattttttttactcgttcgatagagagttcggg

SEQ ID NO: 1645 - DNA, 102 bp, synthetic construct
  source 1..102: mol_type = other DNA
gaaaagttcggatctgttttagagctacctacacgatagtggtcgtgcgcttttttttcagccaactccaattttttttgcgcacgaccactatcgtgtagg

SEQ ID NO: 1646 - DNA, 101 bp, synthetic construct
  source 1..101: mol_type = other DNA
gtcgccattggccagttttagagctacctacacgatagtggtcgtgcgcttttttttcagccaactccaattttttttgcgcacgaccactatcgtgtagg

SEQ ID NO: 1647 - DNA, 102 bp, synthetic construct
  source 1..102: mol_type = other DNA
gctccctcgcctatagttttagagctacctacacgatagtggtcgtgcgcttttttttcagccaactccaattttttttgcgcacgaccactatcgtgtagg

SEQ ID NO: 1648 - DNA, 101 bp, synthetic construct
  source 1..101: mol_type = other DNA
ggcccgggagccgggttttagagctacctacacgatagtggtcgtgcgcttttttttcagccaactccaattttttttgcgcacgaccactatcgtgtagg

SEQ ID NO: 1649 - DNA, 102 bp, synthetic construct
  source 1..102: mol_type = other DNA
gaaaagttcggatctgttttagagctaccctggcggaacgttcgagtaatttttttttcagccaactccaattttttttattactcgaacgttccgccaggg

SEQ ID NO: 1650 - DNA, 101 bp, synthetic construct
  source 1..101: mol_type = other DNA
gtcgccattggccagttttagagctaccctggcggaacgttcgagtaatttttttttcagccaactccaattttttttattactcgaacgttccgccaggg

SEQ ID NO: 1651 - DNA, 102 bp, synthetic construct
  source 1..102: mol_type = other DNA
gctccctcgcctatagttttagagctaccctggcggaacgttcgagtaatttttttttcagccaactccaattttttttattactcgaacgttccgccaggg

SEQ ID NO: 1652 - DNA, 101 bp, synthetic construct
  source 1..101: mol_type = other DNA
ggcccgggagccgggttttagagctaccctggcggaacgttcgagtaatttttttttcagccaactccaattttttttattactcgaacgttccgccaggg

SEQ ID NO: 1653 - DNA, 102 bp, synthetic construct
  source 1..102: mol_type = other DNA
gaaaagttcggatctgttttagagctacctacactcgacatcggtagctattttttttcagccaactccaatttttttttagctaccgatgtcgagtgtagg

SEQ ID NO: 1654 - DNA, 101 bp, synthetic construct
  source 1..101: mol_type = other DNA
gtcgccattggccagttttagagctacctacactcgacatcggtagctattttttttcagccaactccaatttttttttagctaccgatgtcgagtgtagg

SEQ ID NO: 1655 - DNA, 102 bp, synthetic construct
  source 1..102: mol_type = other DNA
gctccctcgcctatagttttagagctacctacactcgacatcggtagctattttttttcagccaactccaatttttttttagctaccgatgtcgagtgtagg

SEQ ID NO: 1656 - DNA, 101 bp, synthetic construct
  source 1..101: mol_type = other DNA
ggcccgggagccgggttttagagctacctacactcgacatcggtagctattttttttcagccaactccaatttttttttagctaccgatgtcgagtgtagg

SEQ ID NO: 1657 - DNA, 104 bp, synthetic construct
  source 1..104: mol_type = other DNA
gatcctttcgggcgcgttttagagctaccgtcgttgtaccgtctacttgacttttttttcagccaactccaattttttttgtcaagtagacggtacaacgacgg

SEQ ID NO: 1658 - DNA, 104 bp, synthetic construct
  source 1..104: mol_type = other DNA
gatgcacacgtcactgttttagagctaccgtcgttgtaccgtctacttgacttttttttcagccaactccaattttttttgtcaagtagacggtacaacgacgg

SEQ ID NO: 1659 - DNA, 103 bp, synthetic construct
  source 1..103: mol_type = other DNA
gaacggagtagtctgttttagagctaccgtcgttgtaccgtctacttgacttttttttcagccaactccaattttttttgtcaagtagacggtacaacgacgg

SEQ ID NO: 1660 - DNA, 103 bp, synthetic construct
  source 1..103: mol_type = other DNA
gggattctgggcgagttttagagctaccgtcgttgtaccgtctacttgacttttttttcagccaactccaattttttttgtcaagtagacggtacaacgacgg

SEQ ID NO: 1661 - DNA, 104 bp, synthetic construct
  source 1..104: mol_type = other DNA
gatcctttcgggcgcgttttagagctaccttcccgacttccgtaggagcgcttttttttcagccaactccaattttttttgcgctcctacggaagtcgggaagg

SEQ ID NO: 1662 - DNA, 104 bp, synthetic construct
  source 1..104: mol_type = other DNA
gatgcacacgtcactgttttagagctaccttcccgacttccgtaggagcgcttttttttcagccaactccaattttttttgcgctcctacggaagtcgggaagg

SEQ ID NO: 1663 - DNA, 103 bp, synthetic construct
  source 1..103: mol_type = other DNA
gaacggagtagtctgttttagagctaccttcccgacttccgtaggagcgcttttttttcagccaactccaattttttttgcgctcctacggaagtcgggaagg

SEQ ID NO: 1664 - DNA, 103 bp, synthetic construct
  source 1..103: mol_type = other DNA
gggattctgggcgagttttagagctaccttcccgacttccgtaggagcgcttttttttcagccaactccaattttttttgcgctcctacggaagtcgggaagg

SEQ ID NO: 1665 - DNA, 104 bp, synthetic construct
  source 1..104: mol_type = other DNA
gatcctttcgggcgcgttttagagctacctgaaggtaaagatcgggtcctcttttttttcagccaactccaattttttttgaggacccgatctttaccttcagg

SEQ ID NO: 1666 - DNA, 104 bp, synthetic construct
  source 1..104: mol_type = other DNA
gatgcacacgtcactgttttagagctacctgaaggtaaagatcgggtcctcttttttttcagccaactccaattttttttgaggacccgatctttaccttcagg

SEQ ID NO: 1667 - DNA, 103 bp, synthetic construct
  source 1..103: mol_type = other DNA
gaacggagtagtctgttttagagctacctgaaggtaaagatcgggtcctcttttttttcagccaactccaattttttttgaggacccgatctttaccttcagg

SEQ ID NO: 1668 - DNA, 103 bp, synthetic construct
  source 1..103: mol_type = other DNA
gggattctgggcgagttttagagctacctgaaggtaaagatcgggtcctcttttttttcagccaactccaattttttttgaggacccgatctttaccttcagg

SEQ ID NO: 1669 - DNA, 102 bp, synthetic construct
  source 1..102: mol_type = other DNA
gatcctttcgggcgcgttttagagctacctggttatagcggacgcactgtttttttttcagccaactccaattttttttacagtgcgtccgctataaccagg

SEQ ID NO: 1670 - DNA, 102 bp, synthetic construct
  source 1..102: mol_type = other DNA
gatgcacacgtcactgttttagagctacctggttatagcggacgcactgtttttttttcagccaactccaattttttttacagtgcgtccgctataaccagg

SEQ ID NO: 1671 - DNA, 101 bp, synthetic construct
  source 1..101: mol_type = other DNA
gaacggagtagtctgttttagagctacctggttatagcggacgcactgtttttttttcagccaactccaattttttttacagtgcgtccgctataaccagg

SEQ ID NO: 1672 - DNA, 101 bp, synthetic construct
  source 1..101: mol_type = other DNA
gggattctgggcgagttttagagctacctggttatagcggacgcactgtttttttttcagccaactccaattttttttacagtgcgtccgctataaccagg

SEQ ID NO: 1673 - DNA, 102 bp, synthetic construct
  source 1..102: mol_type = other DNA
gatcctttcgggcgcgttttagagctaccgcatcgtattatctgcgaagcttttttttcagccaactccaattttttttgcttcgcagataatacgatgcgg

SEQ ID NO: 1674 - DNA, 102 bp, synthetic construct
  source 1..102: mol_type = other DNA
gatgcacacgtcactgttttagagctaccgcatcgtattatctgcgaagcttttttttcagccaactccaattttttttgcttcgcagataatacgatgcgg

SEQ ID NO: 1675 - DNA, 101 bp, synthetic construct
  source 1..101: mol_type = other DNA
gaacggagtagtctgttttagagctaccgcatcgtattatctgcgaagcttttttttcagccaactccaattttttttgcttcgcagataatacgatgcgg

SEQ ID NO: 1676 - DNA, 101 bp, synthetic construct
  source 1..101: mol_type = other DNA
gggattctgggcgagttttagagctaccgcatcgtattatctgcgaagcttttttttcagccaactccaattttttttgcttcgcagataatacgatgcgg

SEQ ID NO: 1677 - DNA, 102 bp, synthetic construct
  source 1..102: mol_type = other DNA
gatcctttcgggcgcgttttagagctaccgctaggacgttcaacggagtcttttttttcagccaactccaattttttttgactccgttgaacgtcctagcgg

SEQ ID NO: 1678 - DNA, 102 bp, synthetic construct
  source 1..102: mol_type = other DNA
gatgcacacgtcactgttttagagctaccgctaggacgttcaacggagtcttttttttcagccaactccaattttttttgactccgttgaacgtcctagcgg

SEQ ID NO: 1679 - DNA, 101 bp, synthetic construct
  source 1..101: mol_type = other DNA
gaacggagtagtctgttttagagctaccgctaggacgttcaacggagtcttttttttcagccaactccaattttttttgactccgttgaacgtcctagcgg

SEQ ID NO: 1680 - DNA, 101 bp, synthetic construct
  source 1..101: mol_type = other DNA
gggattctgggcgagttttagagctaccgctaggacgttcaacggagtcttttttttcagccaactccaattttttttgactccgttgaacgtcctagcgg

SEQ ID NO: 1681 - DNA, 102 bp, synthetic construct
  source 1..102: mol_type = other DNA
gatcctttcgggcgcgttttagagctaccatagcggtactatcggcatctttttttttcagccaactccaattttttttagatgccgatagtaccgctatgg

SEQ ID NO: 1682 - DNA, 102 bp, synthetic construct
  source 1..102: mol_type = other DNA
gatgcacacgtcactgttttagagctaccatagcggtactatcggcatctttttttttcagccaactccaattttttttagatgccgatagtaccgctatgg

SEQ ID NO: 1683 - DNA, 101 bp, synthetic construct
  source 1..101: mol_type = other DNA
gaacggagtagtctgttttagagctaccatagcggtactatcggcatctttttttttcagccaactccaattttttttagatgccgatagtaccgctatgg

SEQ ID NO: 1684 - DNA, 101 bp, synthetic construct
  source 1..101: mol_type = other DNA
gggattctgggcgagttttagagctaccatagcggtactatcggcatctttttttttcagccaactccaattttttttagatgccgatagtaccgctatgg

SEQ ID NO: 1685 - DNA, 102 bp, synthetic construct
  source 1..102: mol_type = other DNA
gatcctttcgggcgcgttttagagctacctcgtactagtctcgcatgaccttttttttcagccaactccaattttttttggtcatgcgagactagtacgagg

SEQ ID NO: 1686 - DNA, 102 bp, synthetic construct
  source 1..102: mol_type = other DNA
gatgcacacgtcactgttttagagctacctcgtactagtctcgcatgaccttttttttcagccaactccaattttttttggtcatgcgagactagtacgagg

SEQ ID NO: 1687 - DNA, 101 bp, synthetic construct
  source 1..101: mol_type = other DNA
gaacggagtagtctgttttagagctacctcgtactagtctcgcatgaccttttttttcagccaactccaattttttttggtcatgcgagactagtacgagg

SEQ ID NO: 1688 - DNA, 101 bp, synthetic construct
  source 1..101: mol_type = other DNA
gggattctgggcgagttttagagctacctcgtactagtctcgcatgaccttttttttcagccaactccaattttttttggtcatgcgagactagtacgagg

SEQ ID NO: 1689 - DNA, 102 bp, synthetic construct
  source 1..102: mol_type = other DNA
gatcctttcgggcgcgttttagagctaccgatagtgctaaacgacgctttttttttttcagccaactccaattttttttaaagcgtcgtttagcactatcgg

SEQ ID NO: 1690 - DNA, 102 bp, synthetic construct
  source 1..102: mol_type = other DNA
gatgcacacgtcactgttttagagctaccgatagtgctaaacgacgctttttttttttcagccaactccaattttttttaaagcgtcgtttagcactatcgg

SEQ ID NO: 1691 - DNA, 101 bp, synthetic construct
  source 1..101: mol_type = other DNA
gaacggagtagtctgttttagagctaccgatagtgctaaacgacgctttttttttttcagccaactccaattttttttaaagcgtcgtttagcactatcgg

SEQ ID NO: 1692 - DNA, 101 bp, synthetic construct
  source 1..101: mol_type = other DNA
gggattctgggcgagttttagagctaccgatagtgctaaacgacgctttttttttttcagccaactccaattttttttaaagcgtcgtttagcactatcgg

SEQ ID NO: 1693 - DNA, 102 bp, synthetic construct
  source 1..102: mol_type = other DNA
gatcctttcgggcgcgttttagagctacccgttatcgacgttcaaggaacttttttttcagccaactccaattttttttgttccttgaacgtcgataacggg

SEQ ID NO: 1694 - DNA, 102 bp, synthetic construct
  source 1..102: mol_type = other DNA
gatgcacacgtcactgttttagagctacccgttatcgacgttcaaggaacttttttttcagccaactccaattttttttgttccttgaacgtcgataacggg

SEQ ID NO: 1695 - DNA, 101 bp, synthetic construct
  source 1..101: mol_type = other DNA
gaacggagtagtctgttttagagctacccgttatcgacgttcaaggaacttttttttcagccaactccaattttttttgttccttgaacgtcgataacggg

SEQ ID NO: 1696 - DNA, 101 bp, synthetic construct
  source 1..101: mol_type = other DNA
gggattctgggcgagttttagagctacccgttatcgacgttcaaggaacttttttttcagccaactccaattttttttgttccttgaacgtcgataacggg

SEQ ID NO: 1697 - DNA, 102 bp, synthetic construct
  source 1..102: mol_type = other DNA
gatcctttcgggcgcgttttagagctaccgatcaatgcggtctgcgtaacttttttttcagccaactccaattttttttgttacgcagaccgcattgatcgg

SEQ ID NO: 1698 - DNA, 102 bp, synthetic construct
  source 1..102: mol_type = other DNA
gatgcacacgtcactgttttagagctaccgatcaatgcggtctgcgtaacttttttttcagccaactccaattttttttgttacgcagaccgcattgatcgg

SEQ ID NO: 1699 - DNA, 101 bp, synthetic construct
  source 1..101: mol_type = other DNA
gaacggagtagtctgttttagagctaccgatcaatgcggtctgcgtaacttttttttcagccaactccaattttttttgttacgcagaccgcattgatcgg

SEQ ID NO: 1700 - DNA, 101 bp, synthetic construct
  source 1..101: mol_type = other DNA
gggattctgggcgagttttagagctaccgatcaatgcggtctgcgtaacttttttttcagccaactccaattttttttgttacgcagaccgcattgatcgg

SEQ ID NO: 1701 - DNA, 102 bp, synthetic construct
  source 1..102: mol_type = other DNA
gatcctttcgggcgcgttttagagctacccttactcgcgatactctcgacttttttttcagccaactccaattttttttgtcgagagtatcgcgagtaaggg

SEQ ID NO: 1702 - DNA, 102 bp, synthetic construct
  source 1..102: mol_type = other DNA
gatgcacacgtcactgttttagagctacccttactcgcgatactctcgacttttttttcagccaactccaattttttttgtcgagagtatcgcgagtaaggg

SEQ ID NO: 1703 - DNA, 101 bp, synthetic construct
  source 1..101: mol_type = other DNA
gaacggagtagtctgttttagagctacccttactcgcgatactctcgacttttttttcagccaactccaattttttttgtcgagagtatcgcgagtaaggg

SEQ ID NO: 1704 - DNA, 101 bp, synthetic construct
  source 1..101: mol_type = other DNA
gggattctgggcgagttttagagctacccttactcgcgatactctcgacttttttttcagccaactccaattttttttgtcgagagtatcgcgagtaaggg

SEQ ID NO: 1705 - DNA, 102 bp, synthetic construct
  source 1..102: mol_type = other DNA
gatcctttcgggcgcgttttagagctaccgcggacggtaagcacggaatattttttttcagccaactccaatttttttttattccgtgcttaccgtccgcgg

SEQ ID NO: 1706 - DNA, 102 bp, synthetic construct
  source 1..102: mol_type = other DNA
gatgcacacgtcactgttttagagctaccgcggacggtaagcacggaatattttttttcagccaactccaatttttttttattccgtgcttaccgtccgcgg

SEQ ID NO: 1707 - DNA, 101 bp, synthetic construct
  source 1..101: mol_type = other DNA
gaacggagtagtctgttttagagctaccgcggacggtaagcacggaatattttttttcagccaactccaatttttttttattccgtgcttaccgtccgcgg

SEQ ID NO: 1708 - DNA, 101 bp, synthetic construct
  source 1..101: mol_type = other DNA
gggattctgggcgagttttagagctaccgcggacggtaagcacggaatattttttttcagccaactccaatttttttttattccgtgcttaccgtccgcgg

SEQ ID NO: 1709 - DNA, 102 bp, synthetic construct
  source 1..102: mol_type = other DNA
gatcctttcgggcgcgttttagagctacctatagtcacgaatcgtagggtttttttttcagccaactccaattttttttaccctacgattcgtgactatagg

SEQ ID NO: 1710 - DNA, 102 bp, synthetic construct
  source 1..102: mol_type = other DNA
gatgcacacgtcactgttttagagctacctatagtcacgaatcgtagggtttttttttcagccaactccaattttttttaccctacgattcgtgactatagg

SEQ ID NO: 1711 - DNA, 101 bp, synthetic construct
  source 1..101: mol_type = other DNA
gaacggagtagtctgttttagagctacctatagtcacgaatcgtagggtttttttttcagccaactccaattttttttaccctacgattcgtgactatagg

SEQ ID NO: 1712 - DNA, 101 bp, synthetic construct
  source 1..101: mol_type = other DNA
gggattctgggcgagttttagagctacctatagtcacgaatcgtagggtttttttttcagccaactccaattttttttaccctacgattcgtgactatagg

SEQ ID NO: 1713 - DNA, 102 bp, synthetic construct
  source 1..102: mol_type = other DNA
gatcctttcgggcgcgttttagagctacccgtcgtcacgtatgcgtagcattttttttcagccaactccaatttttttttgctacgcatacgtgacgacggg

SEQ ID NO: 1714 - DNA, 102 bp, synthetic construct
  source 1..102: mol_type = other DNA
gatgcacacgtcactgttttagagctacccgtcgtcacgtatgcgtagcattttttttcagccaactccaatttttttttgctacgcatacgtgacgacggg

SEQ ID NO: 1715 - DNA, 101 bp, synthetic construct
  source 1..101: mol_type = other DNA
gaacggagtagtctgttttagagctacccgtcgtcacgtatgcgtagcattttttttcagccaactccaatttttttttgctacgcatacgtgacgacggg

SEQ ID NO: 1716 - DNA, 101 bp, synthetic construct
  source 1..101: mol_type = other DNA
gggattctgggcgagttttagagctacccgtcgtcacgtatgcgtagcattttttttcagccaactccaatttttttttgctacgcatacgtgacgacggg

SEQ ID NO: 1717 - DNA, 102 bp, synthetic construct
  source 1..102: mol_type = other DNA
gatcctttcgggcgcgttttagagctacccgagaggtagtagacgacgcattttttttcagccaactccaatttttttttgcgtcgtctactacctctcggg

SEQ ID NO: 1718 - DNA, 102 bp, synthetic construct
  source 1..102: mol_type = other DNA
gatgcacacgtcactgttttagagctacccgagaggtagtagacgacgcattttttttcagccaactccaatttttttttgcgtcgtctactacctctcggg

SEQ ID NO: 1719 - DNA, 101 bp, synthetic construct
  source 1..101: mol_type = other DNA
gaacggagtagtctgttttagagctacccgagaggtagtagacgacgcattttttttcagccaactccaatttttttttgcgtcgtctactacctctcggg

SEQ ID NO: 1720 - DNA, 101 bp, synthetic construct
  source 1..101: mol_type = other DNA
gggattctgggcgagttttagagctacccgagaggtagtagacgacgcattttttttcagccaactccaatttttttttgcgtcgtctactacctctcggg

SEQ ID NO: 1721 - DNA, 102 bp, synthetic construct
  source 1..102: mol_type = other DNA
gatcctttcgggcgcgttttagagctaccgacgtctacggacgggagctattttttttcagccaactccaatttttttttagctcccgtccgtagacgtcgg

SEQ ID NO: 1722 - DNA, 102 bp, synthetic construct
  source 1..102: mol_type = other DNA
gatgcacacgtcactgttttagagctaccgacgtctacggacgggagctattttttttcagccaactccaatttttttttagctcccgtccgtagacgtcgg

SEQ ID NO: 1723 - DNA, 101 bp, synthetic construct
  source 1..101: mol_type = other DNA
gaacggagtagtctgttttagagctaccgacgtctacggacgggagctattttttttcagccaactccaatttttttttagctcccgtccgtagacgtcgg

SEQ ID NO: 1724 - DNA, 101 bp, synthetic construct
  source 1..101: mol_type = other DNA
gggattctgggcgagttttagagctaccgacgtctacggacgggagctattttttttcagccaactccaatttttttttagctcccgtccgtagacgtcgg

SEQ ID NO: 1725 - DNA, 102 bp, synthetic construct
  source 1..102: mol_type = other DNA
gatcctttcgggcgcgttttagagctaccaaagctcattcgcgactgagcttttttttcagccaactccaattttttttgctcagtcgcgaatgagctttgg

SEQ ID NO: 1726 - DNA, 102 bp, synthetic construct
  source 1..102: mol_type = other DNA
gatgcacacgtcactgttttagagctaccaaagctcattcgcgactgagcttttttttcagccaactccaattttttttgctcagtcgcgaatgagctttgg

SEQ ID NO: 1727 - DNA, 101 bp, synthetic construct
  source 1..101: mol_type = other DNA
gaacggagtagtctgttttagagctaccaaagctcattcgcgactgagcttttttttcagccaactccaattttttttgctcagtcgcgaatgagctttgg

SEQ ID NO: 1728 - DNA, 101 bp, synthetic construct
  source 1..101: mol_type = other DNA
gggattctgggcgagttttagagctaccaaagctcattcgcgactgagcttttttttcagccaactccaattttttttgctcagtcgcgaatgagctttgg

SEQ ID NO: 1729 - DNA, 102 bp, synthetic construct
  source 1..102: mol_type = other DNA
gatcctttcgggcgcgttttagagctaccatggcacgatcgacacggaggttttttttcagccaactccaattttttttcctccgtgtcgatcgtgccatgg

SEQ ID NO: 1730 - DNA, 102 bp, synthetic construct
  source 1..102: mol_type = other DNA
gatgcacacgtcactgttttagagctaccatggcacgatcgacacggaggttttttttcagccaactccaattttttttcctccgtgtcgatcgtgccatgg

SEQ ID NO: 1731 - DNA, 101 bp, synthetic construct
  source 1..101: mol_type = other DNA
gaacggagtagtctgttttagagctaccatggcacgatcgacacggaggttttttttcagccaactccaattttttttcctccgtgtcgatcgtgccatgg

SEQ ID NO: 1732 - DNA, 101 bp, synthetic construct
  source 1..101: mol_type = other DNA
gggattctgggcgagttttagagctaccatggcacgatcgacacggaggttttttttcagccaactccaattttttttcctccgtgtcgatcgtgccatgg

SEQ ID NO: 1733 - DNA, 102 bp, synthetic construct
  source 1..102: mol_type = other DNA
gatcctttcgggcgcgttttagagctacccgaactctctatcgaacgagtttttttttcagccaactccaattttttttactcgttcgatagagagttcggg

SEQ ID NO: 1734 - DNA, 102 bp, synthetic construct
  source 1..102: mol_type = other DNA
gatgcacacgtcactgttttagagctacccgaactctctatcgaacgagtttttttttcagccaactccaattttttttactcgttcgatagagagttcggg

SEQ ID NO: 1735 - DNA, 101 bp, synthetic construct
  source 1..101: mol_type = other DNA
gaacggagtagtctgttttagagctacccgaactctctatcgaacgagtttttttttcagccaactccaattttttttactcgttcgatagagagttcggg

SEQ ID NO: 1736 - DNA, 101 bp, synthetic construct
  source 1..101: mol_type = other DNA
gggattctgggcgagttttagagctacccgaactctctatcgaacgagtttttttttcagccaactccaattttttttactcgttcgatagagagttcggg

SEQ ID NO: 1737 - DNA, 102 bp, synthetic construct
  source 1..102: mol_type = other DNA
gatcctttcgggcgcgttttagagctacctacacgatagtggtcgtgcgcttttttttcagccaactccaattttttttgcgcacgaccactatcgtgtagg

SEQ ID NO: 1738 - DNA, 102 bp, synthetic construct
  source 1..102: mol_type = other DNA
gatgcacacgtcactgttttagagctacctacacgatagtggtcgtgcgcttttttttcagccaactccaattttttttgcgcacgaccactatcgtgtagg

SEQ ID NO: 1739 - DNA, 101 bp, synthetic construct
  source 1..101: mol_type = other DNA
gaacggagtagtctgttttagagctacctacacgatagtggtcgtgcgcttttttttcagccaactccaattttttttgcgcacgaccactatcgtgtagg

SEQ ID NO: 1740 - DNA, 101 bp, synthetic construct
  source 1..101: mol_type = other DNA
gggattctgggcgagttttagagctacctacacgatagtggtcgtgcgcttttttttcagccaactccaattttttttgcgcacgaccactatcgtgtagg

SEQ ID NO: 1741 - DNA, 102 bp, synthetic construct
  source 1..102: mol_type = other DNA
gatcctttcgggcgcgttttagagctaccctggcggaacgttcgagtaatttttttttcagccaactccaattttttttattactcgaacgttccgccaggg

SEQ ID NO: 1742 - DNA, 102 bp, synthetic construct
  source 1..102: mol_type = other DNA
gatgcacacgtcactgttttagagctaccctggcggaacgttcgagtaatttttttttcagccaactccaattttttttattactcgaacgttccgccaggg

SEQ ID NO: 1743 - DNA, 101 bp, synthetic construct
  source 1..101: mol_type = other DNA
gaacggagtagtctgttttagagctaccctggcggaacgttcgagtaatttttttttcagccaactccaattttttttattactcgaacgttccgccaggg

SEQ ID NO: 1744 - DNA, 101 bp, synthetic construct
  source 1..101: mol_type = other DNA
gggattctgggcgagttttagagctaccctggcggaacgttcgagtaatttttttttcagccaactccaattttttttattactcgaacgttccgccaggg

SEQ ID NO: 1745 - DNA, 102 bp, synthetic construct
  source 1..102: mol_type = other DNA
gatcctttcgggcgcgttttagagctacctacactcgacatcggtagctattttttttcagccaactccaatttttttttagctaccgatgtcgagtgtagg

SEQ ID NO: 1746 - DNA, 102 bp, synthetic construct
  source 1..102: mol_type = other DNA
gatgcacacgtcactgttttagagctacctacactcgacatcggtagctattttttttcagccaactccaatttttttttagctaccgatgtcgagtgtagg

SEQ ID NO: 1747 - DNA, 101 bp, synthetic construct
  source 1..101: mol_type = other DNA
gaacggagtagtctgttttagagctacctacactcgacatcggtagctattttttttcagccaactccaatttttttttagctaccgatgtcgagtgtagg

SEQ ID NO: 1748 - DNA, 101 bp, synthetic construct
  source 1..101: mol_type = other DNA
gggattctgggcgagttttagagctacctacactcgacatcggtagctattttttttcagccaactccaatttttttttagctaccgatgtcgagtgtagg

SEQ ID NO: 1749 - DNA, 104 bp, synthetic construct
  source 1..104: mol_type = other DNA
gaccccgaggaaggggttttagagctaccgtcgttgtaccgtctacttgacttttttttcagccaactccaattttttttgtcaagtagacggtacaacgacgg

SEQ ID NO: 1750 - DNA, 103 bp, synthetic construct
  source 1..103: mol_type = other DNA
gcgctagggttcgggttttagagctaccgtcgttgtaccgtctacttgacttttttttcagccaactccaattttttttgtcaagtagacggtacaacgacgg

SEQ ID NO: 1751 - DNA, 104 bp, synthetic construct
  source 1..104: mol_type = other DNA
gagccccatccggaggttttagagctaccgtcgttgtaccgtctacttgacttttttttcagccaactccaattttttttgtcaagtagacggtacaacgacgg

SEQ ID NO: 1752 - DNA, 103 bp, synthetic construct
  source 1..103: mol_type = other DNA
ggcctgacgtgagggttttagagctaccgtcgttgtaccgtctacttgacttttttttcagccaactccaattttttttgtcaagtagacggtacaacgacgg

SEQ ID NO: 1753 - DNA, 104 bp, synthetic construct
  source 1..104: mol_type = other DNA
gaccccgaggaaggggttttagagctaccttcccgacttccgtaggagcgcttttttttcagccaactccaattttttttgcgctcctacggaagtcgggaagg

SEQ ID NO: 1754 - DNA, 103 bp, synthetic construct
  source 1..103: mol_type = other DNA
gcgctagggttcgggttttagagctaccttcccgacttccgtaggagcgcttttttttcagccaactccaattttttttgcgctcctacggaagtcgggaagg

SEQ ID NO: 1755 - DNA, 104 bp, synthetic construct
  source 1..104: mol_type = other DNA
gagccccatccggaggttttagagctaccttcccgacttccgtaggagcgcttttttttcagccaactccaattttttttgcgctcctacggaagtcgggaagg

SEQ ID NO: 1756 - DNA, 103 bp, synthetic construct
  source 1..103: mol_type = other DNA
ggcctgacgtgagggttttagagctaccttcccgacttccgtaggagcgcttttttttcagccaactccaattttttttgcgctcctacggaagtcgggaagg

SEQ ID NO: 1757 - DNA, 104 bp, synthetic construct
  source 1..104: mol_type = other DNA
gaccccgaggaaggggttttagagctacctgaaggtaaagatcgggtcctcttttttttcagccaactccaattttttttgaggacccgatctttaccttcagg

SEQ ID NO: 1758 - DNA, 103 bp, synthetic construct
  source 1..103: mol_type = other DNA
gcgctagggttcgggttttagagctacctgaaggtaaagatcgggtcctcttttttttcagccaactccaattttttttgaggacccgatctttaccttcagg

SEQ ID NO: 1759 - DNA, 104 bp, synthetic construct
  source 1..104: mol_type = other DNA
gagccccatccggaggttttagagctacctgaaggtaaagatcgggtcctcttttttttcagccaactccaattttttttgaggacccgatctttaccttcagg

SEQ ID NO: 1760 - DNA, 103 bp, synthetic construct
  source 1..103: mol_type = other DNA
ggcctgacgtgagggttttagagctacctgaaggtaaagatcgggtcctcttttttttcagccaactccaattttttttgaggacccgatctttaccttcagg

SEQ ID NO: 1761 - DNA, 102 bp, synthetic construct
  source 1..102: mol_type = other DNA
gaccccgaggaaggggttttagagctacctggttatagcggacgcactgtttttttttcagccaactccaattttttttacagtgcgtccgctataaccagg

SEQ ID NO: 1762 - DNA, 101 bp, synthetic construct
  source 1..101: mol_type = other DNA
gcgctagggttcgggttttagagctacctggttatagcggacgcactgtttttttttcagccaactccaattttttttacagtgcgtccgctataaccagg

SEQ ID NO: 1763 - DNA, 102 bp, synthetic construct
  source 1..102: mol_type = other DNA
gagccccatccggaggttttagagctacctggttatagcggacgcactgtttttttttcagccaactccaattttttttacagtgcgtccgctataaccagg

SEQ ID NO: 1764 - DNA, 101 bp, synthetic construct
  source 1..101: mol_type = other DNA
ggcctgacgtgagggttttagagctacctggttatagcggacgcactgtttttttttcagccaactccaattttttttacagtgcgtccgctataaccagg

SEQ ID NO: 1765 - DNA, 102 bp, synthetic construct
  source 1..102: mol_type = other DNA
gaccccgaggaaggggttttagagctaccgcatcgtattatctgcgaagcttttttttcagccaactccaattttttttgcttcgcagataatacgatgcgg

SEQ ID NO: 1766 - DNA, 101 bp, synthetic construct
  source 1..101: mol_type = other DNA
gcgctagggttcgggttttagagctaccgcatcgtattatctgcgaagcttttttttcagccaactccaattttttttgcttcgcagataatacgatgcgg

SEQ ID NO: 1767 - DNA, 102 bp, synthetic construct
  source 1..102: mol_type = other DNA
gagccccatccggaggttttagagctaccgcatcgtattatctgcgaagcttttttttcagccaactccaattttttttgcttcgcagataatacgatgcgg

SEQ ID NO: 1768 - DNA, 101 bp, synthetic construct
  source 1..101: mol_type = other DNA
ggcctgacgtgagggttttagagctaccgcatcgtattatctgcgaagcttttttttcagccaactccaattttttttgcttcgcagataatacgatgcgg

SEQ ID NO: 1769 - DNA, 102 bp, synthetic construct
  source 1..102: mol_type = other DNA
gaccccgaggaaggggttttagagctaccgctaggacgttcaacggagtcttttttttcagccaactccaattttttttgactccgttgaacgtcctagcgg

SEQ ID NO: 1770 - DNA, 101 bp, synthetic construct
  source 1..101: mol_type = other DNA
gcgctagggttcgggttttagagctaccgctaggacgttcaacggagtcttttttttcagccaactccaattttttttgactccgttgaacgtcctagcgg

SEQ ID NO: 1771 - DNA, 102 bp, synthetic construct
  source 1..102: mol_type = other DNA
gagccccatccggaggttttagagctaccgctaggacgttcaacggagtcttttttttcagccaactccaattttttttgactccgttgaacgtcctagcgg

SEQ ID NO: 1772 - DNA, 101 bp, synthetic construct
  source 1..101: mol_type = other DNA
ggcctgacgtgagggttttagagctaccgctaggacgttcaacggagtcttttttttcagccaactccaattttttttgactccgttgaacgtcctagcgg

SEQ ID NO: 1773 - DNA, 102 bp, synthetic construct
  source 1..102: mol_type = other DNA
gaccccgaggaaggggttttagagctaccatagcggtactatcggcatctttttttttcagccaactccaattttttttagatgccgatagtaccgctatgg

SEQ ID NO: 1774 - DNA, 101 bp, synthetic construct
  source 1..101: mol_type = other DNA
gcgctagggttcgggttttagagctaccatagcggtactatcggcatctttttttttcagccaactccaattttttttagatgccgatagtaccgctatgg

SEQ ID NO: 1775 - DNA, 102 bp, synthetic construct
  source 1..102: mol_type = other DNA
gagccccatccggaggttttagagctaccatagcggtactatcggcatctttttttttcagccaactccaattttttttagatgccgatagtaccgctatgg

SEQ ID NO: 1776 - DNA, 101 bp, synthetic construct
  source 1..101: mol_type = other DNA
ggcctgacgtgagggttttagagctaccatagcggtactatcggcatctttttttttcagccaactccaattttttttagatgccgatagtaccgctatgg

SEQ ID NO: 1777 - DNA, 102 bp, synthetic construct
  source 1..102: mol_type = other DNA
gaccccgaggaaggggttttagagctacctcgtactagtctcgcatgaccttttttttcagccaactccaattttttttggtcatgcgagactagtacgagg

SEQ ID NO: 1778 - DNA, 101 bp, synthetic construct
  source 1..101: mol_type = other DNA
gcgctagggttcgggttttagagctacctcgtactagtctcgcatgaccttttttttcagccaactccaattttttttggtcatgcgagactagtacgagg

SEQ ID NO: 1779 - DNA, 102 bp, synthetic construct
  source 1..102: mol_type = other DNA
gagccccatccggaggttttagagctacctcgtactagtctcgcatgaccttttttttcagccaactccaattttttttggtcatgcgagactagtacgagg

SEQ ID NO: 1780 - DNA, 101 bp, synthetic construct
  source 1..101: mol_type = other DNA
ggcctgacgtgagggttttagagctacctcgtactagtctcgcatgaccttttttttcagccaactccaattttttttggtcatgcgagactagtacgagg

SEQ ID NO: 1781 - DNA, 102 bp, synthetic construct
  source 1..102: mol_type = other DNA
gaccccgaggaaggggttttagagctaccgatagtgctaaacgacgctttttttttttcagccaactccaattttttttaaagcgtcgtttagcactatcgg

SEQ ID NO: 1782 - DNA, 101 bp, synthetic construct
  source 1..101: mol_type = other DNA
gcgctagggttcgggttttagagctaccgatagtgctaaacgacgctttttttttttcagccaactccaattttttttaaagcgtcgtttagcactatcgg

SEQ ID NO: 1783 - DNA, 102 bp, synthetic construct
  source 1..102: mol_type = other DNA
gagccccatccggaggttttagagctaccgatagtgctaaacgacgctttttttttttcagccaactccaattttttttaaagcgtcgtttagcactatcgg

SEQ ID NO: 1784 - DNA, 101 bp, synthetic construct
  source 1..101: mol_type = other DNA
ggcctgacgtgagggttttagagctaccgatagtgctaaacgacgctttttttttttcagccaactccaattttttttaaagcgtcgtttagcactatcgg

SEQ ID NO: 1785 - DNA, 102 bp, synthetic construct
  source 1..102: mol_type = other DNA
gaccccgaggaaggggttttagagctacccgttatcgacgttcaaggaacttttttttcagccaactccaattttttttgttccttgaacgtcgataacggg

SEQ ID NO: 1786 - DNA, 101 bp, synthetic construct
  source 1..101: mol_type = other DNA
gcgctagggttcgggttttagagctacccgttatcgacgttcaaggaacttttttttcagccaactccaattttttttgttccttgaacgtcgataacggg

SEQ ID NO: 1787 - DNA, 102 bp, synthetic construct
  source 1..102: mol_type = other DNA
gagccccatccggaggttttagagctacccgttatcgacgttcaaggaacttttttttcagccaactccaattttttttgttccttgaacgtcgataacggg

SEQ ID NO: 1788 - DNA, 101 bp, synthetic construct
  source 1..101: mol_type = other DNA
ggcctgacgtgagggttttagagctacccgttatcgacgttcaaggaacttttttttcagccaactccaattttttttgttccttgaacgtcgataacggg

SEQ ID NO: 1789 - DNA, 102 bp, synthetic construct
  source 1..102: mol_type = other DNA
gaccccgaggaaggggttttagagctaccgatcaatgcggtctgcgtaacttttttttcagccaactccaattttttttgttacgcagaccgcattgatcgg

SEQ ID NO: 1790 - DNA, 101 bp, synthetic construct
  source 1..101: mol_type = other DNA
gcgctagggttcgggttttagagctaccgatcaatgcggtctgcgtaacttttttttcagccaactccaattttttttgttacgcagaccgcattgatcgg

SEQ ID NO: 1791 - DNA, 102 bp, synthetic construct
  source 1..102: mol_type = other DNA
gagccccatccggaggttttagagctaccgatcaatgcggtctgcgtaacttttttttcagccaactccaattttttttgttacgcagaccgcattgatcgg

SEQ ID NO: 1792 - DNA, 101 bp, synthetic construct
  source 1..101: mol_type = other DNA
ggcctgacgtgagggttttagagctaccgatcaatgcggtctgcgtaacttttttttcagccaactccaattttttttgttacgcagaccgcattgatcgg

SEQ ID NO: 1793 - DNA, 102 bp, synthetic construct
  source 1..102: mol_type = other DNA
gaccccgaggaaggggttttagagctacccttactcgcgatactctcgacttttttttcagccaactccaattttttttgtcgagagtatcgcgagtaaggg

SEQ ID NO: 1794 - DNA, 101 bp, synthetic construct
  source 1..101: mol_type = other DNA
gcgctagggttcgggttttagagctacccttactcgcgatactctcgacttttttttcagccaactccaattttttttgtcgagagtatcgcgagtaaggg

SEQ ID NO: 1795 - DNA, 102 bp, synthetic construct
  source 1..102: mol_type = other DNA
gagccccatccggaggttttagagctacccttactcgcgatactctcgacttttttttcagccaactccaattttttttgtcgagagtatcgcgagtaaggg

SEQ ID NO: 1796 - DNA, 101 bp, synthetic construct
  source 1..101: mol_type = other DNA
ggcctgacgtgagggttttagagctacccttactcgcgatactctcgacttttttttcagccaactccaattttttttgtcgagagtatcgcgagtaaggg

SEQ ID NO: 1797 - DNA, 102 bp, synthetic construct
  source 1..102: mol_type = other DNA
gaccccgaggaaggggttttagagctaccgcggacggtaagcacggaatattttttttcagccaactccaatttttttttattccgtgcttaccgtccgcgg

SEQ ID NO: 1798 - DNA, 101 bp, synthetic construct
  source 1..101: mol_type = other DNA
gcgctagggttcgggttttagagctaccgcggacggtaagcacggaatattttttttcagccaactccaatttttttttattccgtgcttaccgtccgcgg

SEQ ID NO: 1799 - DNA, 102 bp, synthetic construct
  source 1..102: mol_type = other DNA
gagccccatccggaggttttagagctaccgcggacggtaagcacggaatattttttttcagccaactccaatttttttttattccgtgcttaccgtccgcgg

SEQ ID NO: 1800 - DNA, 101 bp, synthetic construct
  source 1..101: mol_type = other DNA
ggcctgacgtgagggttttagagctaccgcggacggtaagcacggaatattttttttcagccaactccaatttttttttattccgtgcttaccgtccgcgg

SEQ ID NO: 1801 - DNA, 102 bp, synthetic construct
  source 1..102: mol_type = other DNA
gaccccgaggaaggggttttagagctacctatagtcacgaatcgtagggtttttttttcagccaactccaattttttttaccctacgattcgtgactatagg

SEQ ID NO: 1802 - DNA, 101 bp, synthetic construct
  source 1..101: mol_type = other DNA
gcgctagggttcgggttttagagctacctatagtcacgaatcgtagggtttttttttcagccaactccaattttttttaccctacgattcgtgactatagg

SEQ ID NO: 1803 - DNA, 102 bp, synthetic construct
  source 1..102: mol_type = other DNA
gagccccatccggaggttttagagctacctatagtcacgaatcgtagggtttttttttcagccaactccaattttttttaccctacgattcgtgactatagg

SEQ ID NO: 1804 - DNA, 101 bp, synthetic construct
  source 1..101: mol_type = other DNA
ggcctgacgtgagggttttagagctacctatagtcacgaatcgtagggtttttttttcagccaactccaattttttttaccctacgattcgtgactatagg

SEQ ID NO: 1805 - DNA, 102 bp, synthetic construct
  source 1..102: mol_type = other DNA
gaccccgaggaaggggttttagagctacccgtcgtcacgtatgcgtagcattttttttcagccaactccaatttttttttgctacgcatacgtgacgacggg

SEQ ID NO: 1806 - DNA, 101 bp, synthetic construct
  source 1..101: mol_type = other DNA
gcgctagggttcgggttttagagctacccgtcgtcacgtatgcgtagcattttttttcagccaactccaatttttttttgctacgcatacgtgacgacggg

SEQ ID NO: 1807 - DNA, 102 bp, synthetic construct
  source 1..102: mol_type = other DNA
gagccccatccggaggttttagagctacccgtcgtcacgtatgcgtagcattttttttcagccaactccaatttttttttgctacgcatacgtgacgacggg

SEQ ID NO: 1808 - DNA, 101 bp, synthetic construct
  source 1..101: mol_type = other DNA
ggcctgacgtgagggttttagagctacccgtcgtcacgtatgcgtagcattttttttcagccaactccaatttttttttgctacgcatacgtgacgacggg

SEQ ID NO: 1809 - DNA, 102 bp, synthetic construct
  source 1..102: mol_type = other DNA
gaccccgaggaaggggttttagagctacccgagaggtagtagacgacgcattttttttcagccaactccaatttttttttgcgtcgtctactacctctcggg

SEQ ID NO: 1810 - DNA, 101 bp, synthetic construct
  source 1..101: mol_type = other DNA
gcgctagggttcgggttttagagctacccgagaggtagtagacgacgcattttttttcagccaactccaatttttttttgcgtcgtctactacctctcggg

SEQ ID NO: 1811 - DNA, 102 bp, synthetic construct
  source 1..102: mol_type = other DNA
gagccccatccggaggttttagagctacccgagaggtagtagacgacgcattttttttcagccaactccaatttttttttgcgtcgtctactacctctcggg

SEQ ID NO: 1812 - DNA, 101 bp, synthetic construct
  source 1..101: mol_type = other DNA
ggcctgacgtgagggttttagagctacccgagaggtagtagacgacgcattttttttcagccaactccaatttttttttgcgtcgtctactacctctcggg

SEQ ID NO: 1813 - DNA, 102 bp, synthetic construct
  source 1..102: mol_type = other DNA
gaccccgaggaaggggttttagagctaccgacgtctacggacgggagctattttttttcagccaactccaatttttttttagctcccgtccgtagacgtcgg

SEQ ID NO: 1814 - DNA, 101 bp, synthetic construct
  source 1..101: mol_type = other DNA
gcgctagggttcgggttttagagctaccgacgtctacggacgggagctattttttttcagccaactccaatttttttttagctcccgtccgtagacgtcgg

SEQ ID NO: 1815 - DNA, 102 bp, synthetic construct
  source 1..102: mol_type = other DNA
gagccccatccggaggttttagagctaccgacgtctacggacgggagctattttttttcagccaactccaatttttttttagctcccgtccgtagacgtcgg

SEQ ID NO: 1816 - DNA, 101 bp, synthetic construct
  source 1..101: mol_type = other DNA
ggcctgacgtgagggttttagagctaccgacgtctacggacgggagctattttttttcagccaactccaatttttttttagctcccgtccgtagacgtcgg

SEQ ID NO: 1817 - DNA, 102 bp, synthetic construct
  source 1..102: mol_type = other DNA
gaccccgaggaaggggttttagagctaccaaagctcattcgcgactgagcttttttttcagccaactccaattttttttgctcagtcgcgaatgagctttgg

SEQ ID NO: 1818 - DNA, 101 bp, synthetic construct
  source 1..101: mol_type = other DNA
gcgctagggttcgggttttagagctaccaaagctcattcgcgactgagcttttttttcagccaactccaattttttttgctcagtcgcgaatgagctttgg

SEQ ID NO: 1819 - DNA, 102 bp, synthetic construct
  source 1..102: mol_type = other DNA
gagccccatccggaggttttagagctaccaaagctcattcgcgactgagcttttttttcagccaactccaattttttttgctcagtcgcgaatgagctttgg

SEQ ID NO: 1820 - DNA, 101 bp, synthetic construct
  source 1..101: mol_type = other DNA
ggcctgacgtgagggttttagagctaccaaagctcattcgcgactgagcttttttttcagccaactccaattttttttgctcagtcgcgaatgagctttgg

SEQ ID NO: 1821 - DNA, 102 bp, synthetic construct
  source 1..102: mol_type = other DNA
gaccccgaggaaggggttttagagctaccatggcacgatcgacacggaggttttttttcagccaactccaattttttttcctccgtgtcgatcgtgccatgg

SEQ ID NO: 1822 - DNA, 101 bp, synthetic construct
  source 1..101: mol_type = other DNA
gcgctagggttcgggttttagagctaccatggcacgatcgacacggaggttttttttcagccaactccaattttttttcctccgtgtcgatcgtgccatgg

SEQ ID NO: 1823 - DNA, 102 bp, synthetic construct
  source 1..102: mol_type = other DNA
gagccccatccggaggttttagagctaccatggcacgatcgacacggaggttttttttcagccaactccaattttttttcctccgtgtcgatcgtgccatgg

SEQ ID NO: 1824 - DNA, 101 bp, synthetic construct
  source 1..101: mol_type = other DNA
ggcctgacgtgagggttttagagctaccatggcacgatcgacacggaggttttttttcagccaactccaattttttttcctccgtgtcgatcgtgccatgg

SEQ ID NO: 1825 - DNA, 102 bp, synthetic construct
  source 1..102: mol_type = other DNA
gaccccgaggaaggggttttagagctacccgaactctctatcgaacgagtttttttttcagccaactccaattttttttactcgttcgatagagagttcggg

SEQ ID NO: 1826 - DNA, 101 bp, synthetic construct
  source 1..101: mol_type = other DNA
gcgctagggttcgggttttagagctacccgaactctctatcgaacgagtttttttttcagccaactccaattttttttactcgttcgatagagagttcggg

SEQ ID NO: 1827 - DNA, 102 bp, synthetic construct
  source 1..102: mol_type = other DNA
gagccccatccggaggttttagagctacccgaactctctatcgaacgagtttttttttcagccaactccaattttttttactcgttcgatagagagttcggg

SEQ ID NO: 1828 - DNA, 101 bp, synthetic construct
  source 1..101: mol_type = other DNA
ggcctgacgtgagggttttagagctacccgaactctctatcgaacgagtttttttttcagccaactccaattttttttactcgttcgatagagagttcggg

SEQ ID NO: 1829 - DNA, 102 bp, synthetic construct
  source 1..102: mol_type = other DNA
gaccccgaggaaggggttttagagctacctacacgatagtggtcgtgcgcttttttttcagccaactccaattttttttgcgcacgaccactatcgtgtagg

SEQ ID NO: 1830 - DNA, 101 bp, synthetic construct
  source 1..101: mol_type = other DNA
gcgctagggttcgggttttagagctacctacacgatagtggtcgtgcgcttttttttcagccaactccaattttttttgcgcacgaccactatcgtgtagg

SEQ ID NO: 1831 - DNA, 102 bp, synthetic construct
  source 1..102: mol_type = other DNA
gagccccatccggaggttttagagctacctacacgatagtggtcgtgcgcttttttttcagccaactccaattttttttgcgcacgaccactatcgtgtagg

SEQ ID NO: 1832 - DNA, 101 bp, synthetic construct
  source 1..101: mol_type = other DNA
ggcctgacgtgagggttttagagctacctacacgatagtggtcgtgcgcttttttttcagccaactccaattttttttgcgcacgaccactatcgtgtagg

SEQ ID NO: 1833 - DNA, 102 bp, synthetic construct
  source 1..102: mol_type = other DNA
gaccccgaggaaggggttttagagctaccctggcggaacgttcgagtaatttttttttcagccaactccaattttttttattactcgaacgttccgccaggg

SEQ ID NO: 1834 - DNA, 101 bp, synthetic construct
  source 1..101: mol_type = other DNA
gcgctagggttcgggttttagagctaccctggcggaacgttcgagtaatttttttttcagccaactccaattttttttattactcgaacgttccgccaggg

SEQ ID NO: 1835 - DNA, 102 bp, synthetic construct
  source 1..102: mol_type = other DNA
gagccccatccggaggttttagagctaccctggcggaacgttcgagtaatttttttttcagccaactccaattttttttattactcgaacgttccgccaggg

SEQ ID NO: 1836 - DNA, 101 bp, synthetic construct
  source 1..101: mol_type = other DNA
ggcctgacgtgagggttttagagctaccctggcggaacgttcgagtaatttttttttcagccaactccaattttttttattactcgaacgttccgccaggg

SEQ ID NO: 1837 - DNA, 102 bp, synthetic construct
  source 1..102: mol_type = other DNA
gaccccgaggaaggggttttagagctacctacactcgacatcggtagctattttttttcagccaactccaatttttttttagctaccgatgtcgagtgtagg

SEQ ID NO: 1838 - DNA, 101 bp, synthetic construct
  source 1..101: mol_type = other DNA
gcgctagggttcgggttttagagctacctacactcgacatcggtagctattttttttcagccaactccaatttttttttagctaccgatgtcgagtgtagg

SEQ ID NO: 1839 - DNA, 102 bp, synthetic construct
  source 1..102: mol_type = other DNA
gagccccatccggaggttttagagctacctacactcgacatcggtagctattttttttcagccaactccaatttttttttagctaccgatgtcgagtgtagg

SEQ ID NO: 1840 - DNA, 101 bp, synthetic construct
  source 1..101: mol_type = other DNA
ggcctgacgtgagggttttagagctacctacactcgacatcggtagctattttttttcagccaactccaatttttttttagctaccgatgtcgagtgtagg

SEQ ID NO: 1841 - DNA, 103 bp, synthetic construct
  source 1..103: mol_type = other DNA
gccccgagtgaagtgttttagagctaccgtcgttgtaccgtctacttgacttttttttcagccaactccaattttttttgtcaagtagacggtacaacgacgg

SEQ ID NO: 1842 - DNA, 104 bp, synthetic construct
  source 1..104: mol_type = other DNA
gcggcccggggaattgttttagagctaccgtcgttgtaccgtctacttgacttttttttcagccaactccaattttttttgtcaagtagacggtacaacgacgg

SEQ ID NO: 1843 - DNA, 104 bp, synthetic construct
  source 1..104: mol_type = other DNA
gattagcaatcgatagttttagagctaccgtcgttgtaccgtctacttgacttttttttcagccaactccaattttttttgtcaagtagacggtacaacgacgg

SEQ ID NO: 1844 - DNA, 104 bp, synthetic construct
  source 1..104: mol_type = other DNA
gtgtcacaacaagacgttttagagctaccgtcgttgtaccgtctacttgacttttttttcagccaactccaattttttttgtcaagtagacggtacaacgacgg

SEQ ID NO: 1845 - DNA, 103 bp, synthetic construct
  source 1..103: mol_type = other DNA
gccccgagtgaagtgttttagagctaccttcccgacttccgtaggagcgcttttttttcagccaactccaattttttttgcgctcctacggaagtcgggaagg

SEQ ID NO: 1846 - DNA, 104 bp, synthetic construct
  source 1..104: mol_type = other DNA
gcggcccggggaattgttttagagctaccttcccgacttccgtaggagcgcttttttttcagccaactccaattttttttgcgctcctacggaagtcgggaagg

SEQ ID NO: 1847 - DNA, 104 bp, synthetic construct
  source 1..104: mol_type = other DNA
gattagcaatcgatagttttagagctaccttcccgacttccgtaggagcgcttttttttcagccaactccaattttttttgcgctcctacggaagtcgggaagg

SEQ ID NO: 1848 - DNA, 104 bp, synthetic construct
  source 1..104: mol_type = other DNA
gtgtcacaacaagacgttttagagctaccttcccgacttccgtaggagcgcttttttttcagccaactccaattttttttgcgctcctacggaagtcgggaagg

SEQ ID NO: 1849 - DNA, 103 bp, synthetic construct
  source 1..103: mol_type = other DNA
gccccgagtgaagtgttttagagctacctgaaggtaaagatcgggtcctcttttttttcagccaactccaattttttttgaggacccgatctttaccttcagg

SEQ ID NO: 1850 - DNA, 104 bp, synthetic construct
  source 1..104: mol_type = other DNA
gcggcccggggaattgttttagagctacctgaaggtaaagatcgggtcctcttttttttcagccaactccaattttttttgaggacccgatctttaccttcagg

SEQ ID NO: 1851 - DNA, 104 bp, synthetic construct
  source 1..104: mol_type = other DNA
gattagcaatcgatagttttagagctacctgaaggtaaagatcgggtcctcttttttttcagccaactccaattttttttgaggacccgatctttaccttcagg

SEQ ID NO: 1852 - DNA, 104 bp, synthetic construct
  source 1..104: mol_type = other DNA
gtgtcacaacaagacgttttagagctacctgaaggtaaagatcgggtcctcttttttttcagccaactccaattttttttgaggacccgatctttaccttcagg

SEQ ID NO: 1853 - DNA, 101 bp, synthetic construct
  source 1..101: mol_type = other DNA
gccccgagtgaagtgttttagagctacctggttatagcggacgcactgtttttttttcagccaactccaattttttttacagtgcgtccgctataaccagg

SEQ ID NO: 1854 - DNA, 102 bp, synthetic construct
  source 1..102: mol_type = other DNA
gcggcccggggaattgttttagagctacctggttatagcggacgcactgtttttttttcagccaactccaattttttttacagtgcgtccgctataaccagg

SEQ ID NO: 1855 - DNA, 102 bp, synthetic construct
  source 1..102: mol_type = other DNA
gattagcaatcgatagttttagagctacctggttatagcggacgcactgtttttttttcagccaactccaattttttttacagtgcgtccgctataaccagg

SEQ ID NO: 1856 - DNA, 102 bp, synthetic construct
  source 1..102: mol_type = other DNA
gtgtcacaacaagacgttttagagctacctggttatagcggacgcactgtttttttttcagccaactccaattttttttacagtgcgtccgctataaccagg

SEQ ID NO: 1857 - DNA, 101 bp, synthetic construct
  source 1..101: mol_type = other DNA
gccccgagtgaagtgttttagagctaccgcatcgtattatctgcgaagcttttttttcagccaactccaattttttttgcttcgcagataatacgatgcgg

SEQ ID NO: 1858 - DNA, 102 bp, synthetic construct
  source 1..102: mol_type = other DNA
gcggcccggggaattgttttagagctaccgcatcgtattatctgcgaagcttttttttcagccaactccaattttttttgcttcgcagataatacgatgcgg

SEQ ID NO: 1859 - DNA, 102 bp, synthetic construct
  source 1..102: mol_type = other DNA
gattagcaatcgatagttttagagctaccgcatcgtattatctgcgaagcttttttttcagccaactccaattttttttgcttcgcagataatacgatgcgg

SEQ ID NO: 1860 - DNA, 102 bp, synthetic construct
  source 1..102: mol_type = other DNA
gtgtcacaacaagacgttttagagctaccgcatcgtattatctgcgaagcttttttttcagccaactccaattttttttgcttcgcagataatacgatgcgg

SEQ ID NO: 1861 - DNA, 101 bp, synthetic construct
  source 1..101: mol_type = other DNA
gccccgagtgaagtgttttagagctaccgctaggacgttcaacggagtcttttttttcagccaactccaattttttttgactccgttgaacgtcctagcgg

SEQ ID NO: 1862 - DNA, 102 bp, synthetic construct
  source 1..102: mol_type = other DNA
gcggcccggggaattgttttagagctaccgctaggacgttcaacggagtcttttttttcagccaactccaattttttttgactccgttgaacgtcctagcgg

SEQ ID NO: 1863 - DNA, 102 bp, synthetic construct
  source 1..102: mol_type = other DNA
gattagcaatcgatagttttagagctaccgctaggacgttcaacggagtcttttttttcagccaactccaattttttttgactccgttgaacgtcctagcgg

SEQ ID NO: 1864 - DNA, 102 bp, synthetic construct
  source 1..102: mol_type = other DNA
gtgtcacaacaagacgttttagagctaccgctaggacgttcaacggagtcttttttttcagccaactccaattttttttgactccgttgaacgtcctagcgg

SEQ ID NO: 1865 - DNA, 101 bp, synthetic construct
  source 1..101: mol_type = other DNA
gccccgagtgaagtgttttagagctaccatagcggtactatcggcatctttttttttcagccaactccaattttttttagatgccgatagtaccgctatgg

SEQ ID NO: 1866 - DNA, 102 bp, synthetic construct
  source 1..102: mol_type = other DNA
gcggcccggggaattgttttagagctaccatagcggtactatcggcatctttttttttcagccaactccaattttttttagatgccgatagtaccgctatgg

SEQ ID NO: 1867 - DNA, 102 bp, synthetic construct
  source 1..102: mol_type = other DNA
gattagcaatcgatagttttagagctaccatagcggtactatcggcatctttttttttcagccaactccaattttttttagatgccgatagtaccgctatgg

SEQ ID NO: 1868 - DNA, 102 bp, synthetic construct
  source 1..102: mol_type = other DNA
gtgtcacaacaagacgttttagagctaccatagcggtactatcggcatctttttttttcagccaactccaattttttttagatgccgatagtaccgctatgg

SEQ ID NO: 1869 - DNA, 101 bp, synthetic construct
  source 1..101: mol_type = other DNA
gccccgagtgaagtgttttagagctacctcgtactagtctcgcatgaccttttttttcagccaactccaattttttttggtcatgcgagactagtacgagg

SEQ ID NO: 1870 - DNA, 102 bp, synthetic construct
  source 1..102: mol_type = other DNA
gcggcccggggaattgttttagagctacctcgtactagtctcgcatgaccttttttttcagccaactccaattttttttggtcatgcgagactagtacgagg

SEQ ID NO: 1871 - DNA, 102 bp, synthetic construct
  source 1..102: mol_type = other DNA
gattagcaatcgatagttttagagctacctcgtactagtctcgcatgaccttttttttcagccaactccaattttttttggtcatgcgagactagtacgagg

SEQ ID NO: 1872 - DNA, 102 bp, synthetic construct
  source 1..102: mol_type = other DNA
gtgtcacaacaagacgttttagagctacctcgtactagtctcgcatgaccttttttttcagccaactccaattttttttggtcatgcgagactagtacgagg

SEQ ID NO: 1873 - DNA, 101 bp, synthetic construct
  source 1..101: mol_type = other DNA
gccccgagtgaagtgttttagagctaccgatagtgctaaacgacgctttttttttttcagccaactccaattttttttaaagcgtcgtttagcactatcgg

SEQ ID NO: 1874 - DNA, 102 bp, synthetic construct
  source 1..102: mol_type = other DNA
gcggcccggggaattgttttagagctaccgatagtgctaaacgacgctttttttttttcagccaactccaattttttttaaagcgtcgtttagcactatcgg

SEQ ID NO: 1875 - DNA, 102 bp, synthetic construct
  source 1..102: mol_type = other DNA
gattagcaatcgatagttttagagctaccgatagtgctaaacgacgctttttttttttcagccaactccaattttttttaaagcgtcgtttagcactatcgg

SEQ ID NO: 1876 - DNA, 102 bp, synthetic construct
  source 1..102: mol_type = other DNA
gtgtcacaacaagacgttttagagctaccgatagtgctaaacgacgctttttttttttcagccaactccaattttttttaaagcgtcgtttagcactatcgg

SEQ ID NO: 1877 - DNA, 101 bp, synthetic construct
  source 1..101: mol_type = other DNA
gccccgagtgaagtgttttagagctacccgttatcgacgttcaaggaacttttttttcagccaactccaattttttttgttccttgaacgtcgataacggg

SEQ ID NO: 1878 - DNA, 102 bp, synthetic construct
  source 1..102: mol_type = other DNA
gcggcccggggaattgttttagagctacccgttatcgacgttcaaggaacttttttttcagccaactccaattttttttgttccttgaacgtcgataacggg

SEQ ID NO: 1879 - DNA, 102 bp, synthetic construct
  source 1..102: mol_type = other DNA
gattagcaatcgatagttttagagctacccgttatcgacgttcaaggaacttttttttcagccaactccaattttttttgttccttgaacgtcgataacggg

SEQ ID NO: 1880 - DNA, 102 bp, synthetic construct
  source 1..102: mol_type = other DNA
gtgtcacaacaagacgttttagagctacccgttatcgacgttcaaggaacttttttttcagccaactccaattttttttgttccttgaacgtcgataacggg

SEQ ID NO: 1881 - DNA, 101 bp, synthetic construct
  source 1..101: mol_type = other DNA
gccccgagtgaagtgttttagagctaccgatcaatgcggtctgcgtaacttttttttcagccaactccaattttttttgttacgcagaccgcattgatcgg

SEQ ID NO: 1882 - DNA, 102 bp, synthetic construct
  source 1..102: mol_type = other DNA
gcggcccggggaattgttttagagctaccgatcaatgcggtctgcgtaacttttttttcagccaactccaattttttttgttacgcagaccgcattgatcgg

SEQ ID NO: 1883 - DNA, 102 bp, synthetic construct
  source 1..102: mol_type = other DNA
gattagcaatcgatagttttagagctaccgatcaatgcggtctgcgtaacttttttttcagccaactccaattttttttgttacgcagaccgcattgatcgg

SEQ ID NO: 1884 - DNA, 102 bp, synthetic construct
  source 1..102: mol_type = other DNA
gtgtcacaacaagacgttttagagctaccgatcaatgcggtctgcgtaacttttttttcagccaactccaattttttttgttacgcagaccgcattgatcgg

SEQ ID NO: 1885 - DNA, 101 bp, synthetic construct
  source 1..101: mol_type = other DNA
gccccgagtgaagtgttttagagctacccttactcgcgatactctcgacttttttttcagccaactccaattttttttgtcgagagtatcgcgagtaaggg

SEQ ID NO: 1886 - DNA, 102 bp, synthetic construct
  source 1..102: mol_type = other DNA
gcggcccggggaattgttttagagctacccttactcgcgatactctcgacttttttttcagccaactccaattttttttgtcgagagtatcgcgagtaaggg

SEQ ID NO: 1887 - DNA, 102 bp, synthetic construct
  source 1..102: mol_type = other DNA
gattagcaatcgatagttttagagctacccttactcgcgatactctcgacttttttttcagccaactccaattttttttgtcgagagtatcgcgagtaaggg

SEQ ID NO: 1888 - DNA, 102 bp, synthetic construct
  source 1..102: mol_type = other DNA
gtgtcacaacaagacgttttagagctacccttactcgcgatactctcgacttttttttcagccaactccaattttttttgtcgagagtatcgcgagtaaggg

SEQ ID NO: 1889 - DNA, 101 bp, synthetic construct
  source 1..101: mol_type = other DNA
gccccgagtgaagtgttttagagctaccgcggacggtaagcacggaatattttttttcagccaactccaatttttttttattccgtgcttaccgtccgcgg

SEQ ID NO: 1890 - DNA, 102 bp, synthetic construct
  source 1..102: mol_type = other DNA
gcggcccggggaattgttttagagctaccgcggacggtaagcacggaatattttttttcagccaactccaatttttttttattccgtgcttaccgtccgcgg

SEQ ID NO: 1891 - DNA, 102 bp, synthetic construct
  source 1..102: mol_type = other DNA
gattagcaatcgatagttttagagctaccgcggacggtaagcacggaatattttttttcagccaactccaatttttttttattccgtgcttaccgtccgcgg

SEQ ID NO: 1892 - DNA, 102 bp, synthetic construct
  source 1..102: mol_type = other DNA
gtgtcacaacaagacgttttagagctaccgcggacggtaagcacggaatattttttttcagccaactccaatttttttttattccgtgcttaccgtccgcgg

SEQ ID NO: 1893 - DNA, 101 bp, synthetic construct
  source 1..101: mol_type = other DNA
gccccgagtgaagtgttttagagctacctatagtcacgaatcgtagggtttttttttcagccaactccaattttttttaccctacgattcgtgactatagg

SEQ ID NO: 1894 - DNA, 102 bp, synthetic construct
  source 1..102: mol_type = other DNA
gcggcccggggaattgttttagagctacctatagtcacgaatcgtagggtttttttttcagccaactccaattttttttaccctacgattcgtgactatagg

SEQ ID NO: 1895 - DNA, 102 bp, synthetic construct
  source 1..102: mol_type = other DNA
gattagcaatcgatagttttagagctacctatagtcacgaatcgtagggtttttttttcagccaactccaattttttttaccctacgattcgtgactatagg

SEQ ID NO: 1896 - DNA, 102 bp, synthetic construct
  source 1..102: mol_type = other DNA
gtgtcacaacaagacgttttagagctacctatagtcacgaatcgtagggtttttttttcagccaactccaattttttttaccctacgattcgtgactatagg

SEQ ID NO: 1897 - DNA, 101 bp, synthetic construct
  source 1..101: mol_type = other DNA
gccccgagtgaagtgttttagagctacccgtcgtcacgtatgcgtagcattttttttcagccaactccaatttttttttgctacgcatacgtgacgacggg

SEQ ID NO: 1898 - DNA, 102 bp, synthetic construct
  source 1..102: mol_type = other DNA
gcggcccggggaattgttttagagctacccgtcgtcacgtatgcgtagcattttttttcagccaactccaatttttttttgctacgcatacgtgacgacggg

SEQ ID NO: 1899 - DNA, 102 bp, synthetic construct
  source 1..102: mol_type = other DNA
gattagcaatcgatagttttagagctacccgtcgtcacgtatgcgtagcattttttttcagccaactccaatttttttttgctacgcatacgtgacgacggg

SEQ ID NO: 1900 - DNA, 102 bp, synthetic construct
  source 1..102: mol_type = other DNA
gtgtcacaacaagacgttttagagctacccgtcgtcacgtatgcgtagcattttttttcagccaactccaatttttttttgctacgcatacgtgacgacggg

SEQ ID NO: 1901 - DNA, 101 bp, synthetic construct
  source 1..101: mol_type = other DNA
gccccgagtgaagtgttttagagctacccgagaggtagtagacgacgcattttttttcagccaactccaatttttttttgcgtcgtctactacctctcggg

SEQ ID NO: 1902 - DNA, 102 bp, synthetic construct
  source 1..102: mol_type = other DNA
gcggcccggggaattgttttagagctacccgagaggtagtagacgacgcattttttttcagccaactccaatttttttttgcgtcgtctactacctctcggg

SEQ ID NO: 1903 - DNA, 102 bp, synthetic construct
  source 1..102: mol_type = other DNA
gattagcaatcgatagttttagagctacccgagaggtagtagacgacgcattttttttcagccaactccaatttttttttgcgtcgtctactacctctcggg

SEQ ID NO: 1904 - DNA, 102 bp, synthetic construct
  source 1..102: mol_type = other DNA
gtgtcacaacaagacgttttagagctacccgagaggtagtagacgacgcattttttttcagccaactccaatttttttttgcgtcgtctactacctctcggg

SEQ ID NO: 1905 - DNA, 101 bp, synthetic construct
  source 1..101: mol_type = other DNA
gccccgagtgaagtgttttagagctaccgacgtctacggacgggagctattttttttcagccaactccaatttttttttagctcccgtccgtagacgtcgg

SEQ ID NO: 1906 - DNA, 102 bp, synthetic construct
  source 1..102: mol_type = other DNA
gcggcccggggaattgttttagagctaccgacgtctacggacgggagctattttttttcagccaactccaatttttttttagctcccgtccgtagacgtcgg

SEQ ID NO: 1907 - DNA, 102 bp, synthetic construct
  source 1..102: mol_type = other DNA
gattagcaatcgatagttttagagctaccgacgtctacggacgggagctattttttttcagccaactccaatttttttttagctcccgtccgtagacgtcgg

SEQ ID NO: 1908 - DNA, 102 bp, synthetic construct
  source 1..102: mol_type = other DNA
gtgtcacaacaagacgttttagagctaccgacgtctacggacgggagctattttttttcagccaactccaatttttttttagctcccgtccgtagacgtcgg

SEQ ID NO: 1909 - DNA, 101 bp, synthetic construct
  source 1..101: mol_type = other DNA
gccccgagtgaagtgttttagagctaccaaagctcattcgcgactgagcttttttttcagccaactccaattttttttgctcagtcgcgaatgagctttgg

SEQ ID NO: 1910 - DNA, 102 bp, synthetic construct
  source 1..102: mol_type = other DNA
gcggcccggggaattgttttagagctaccaaagctcattcgcgactgagcttttttttcagccaactccaattttttttgctcagtcgcgaatgagctttgg

SEQ ID NO: 1911 - DNA, 102 bp, synthetic construct
  source 1..102: mol_type = other DNA
gattagcaatcgatagttttagagctaccaaagctcattcgcgactgagcttttttttcagccaactccaattttttttgctcagtcgcgaatgagctttgg

SEQ ID NO: 1912 - DNA, 102 bp, synthetic construct
  source 1..102: mol_type = other DNA
gtgtcacaacaagacgttttagagctaccaaagctcattcgcgactgagcttttttttcagccaactccaattttttttgctcagtcgcgaatgagctttgg

SEQ ID NO: 1913 - DNA, 101 bp, synthetic construct
  source 1..101: mol_type = other DNA
gccccgagtgaagtgttttagagctaccatggcacgatcgacacggaggttttttttcagccaactccaattttttttcctccgtgtcgatcgtgccatgg

SEQ ID NO: 1914 - DNA, 102 bp, synthetic construct
  source 1..102: mol_type = other DNA
gcggcccggggaattgttttagagctaccatggcacgatcgacacggaggttttttttcagccaactccaattttttttcctccgtgtcgatcgtgccatgg

SEQ ID NO: 1915 - DNA, 102 bp, synthetic construct
  source 1..102: mol_type = other DNA
gattagcaatcgatagttttagagctaccatggcacgatcgacacggaggttttttttcagccaactccaattttttttcctccgtgtcgatcgtgccatgg

SEQ ID NO: 1916 - DNA, 102 bp, synthetic construct
  source 1..102: mol_type = other DNA
gtgtcacaacaagacgttttagagctaccatggcacgatcgacacggaggttttttttcagccaactccaattttttttcctccgtgtcgatcgtgccatgg

SEQ ID NO: 1917 - DNA, 101 bp, synthetic construct
  source 1..101: mol_type = other DNA
gccccgagtgaagtgttttagagctacccgaactctctatcgaacgagtttttttttcagccaactccaattttttttactcgttcgatagagagttcggg

SEQ ID NO: 1918 - DNA, 102 bp, synthetic construct
  source 1..102: mol_type = other DNA
gcggcccggggaattgttttagagctacccgaactctctatcgaacgagtttttttttcagccaactccaattttttttactcgttcgatagagagttcggg

SEQ ID NO: 1919 - DNA, 102 bp, synthetic construct
  source 1..102: mol_type = other DNA
gattagcaatcgatagttttagagctacccgaactctctatcgaacgagtttttttttcagccaactccaattttttttactcgttcgatagagagttcggg

SEQ ID NO: 1920 - DNA, 102 bp, synthetic construct
  source 1..102: mol_type = other DNA
gtgtcacaacaagacgttttagagctacccgaactctctatcgaacgagtttttttttcagccaactccaattttttttactcgttcgatagagagttcggg

SEQ ID NO: 1921 - DNA, 101 bp, synthetic construct
  source 1..101: mol_type = other DNA
gccccgagtgaagtgttttagagctacctacacgatagtggtcgtgcgcttttttttcagccaactccaattttttttgcgcacgaccactatcgtgtagg

SEQ ID NO: 1922 - DNA, 102 bp, synthetic construct
  source 1..102: mol_type = other DNA
gcggcccggggaattgttttagagctacctacacgatagtggtcgtgcgcttttttttcagccaactccaattttttttgcgcacgaccactatcgtgtagg

SEQ ID NO: 1923 - DNA, 102 bp, synthetic construct
  source 1..102: mol_type = other DNA
gattagcaatcgatagttttagagctacctacacgatagtggtcgtgcgcttttttttcagccaactccaattttttttgcgcacgaccactatcgtgtagg

SEQ ID NO: 1924 - DNA, 102 bp, synthetic construct
  source 1..102: mol_type = other DNA
gtgtcacaacaagacgttttagagctacctacacgatagtggtcgtgcgcttttttttcagccaactccaattttttttgcgcacgaccactatcgtgtagg

SEQ ID NO: 1925 - DNA, 101 bp, synthetic construct
  source 1..101: mol_type = other DNA
gccccgagtgaagtgttttagagctaccctggcggaacgttcgagtaatttttttttcagccaactccaattttttttattactcgaacgttccgccaggg

SEQ ID NO: 1926 - DNA, 102 bp, synthetic construct
  source 1..102: mol_type = other DNA
gcggcccggggaattgttttagagctaccctggcggaacgttcgagtaatttttttttcagccaactccaattttttttattactcgaacgttccgccaggg

SEQ ID NO: 1927 - DNA, 102 bp, synthetic construct
  source 1..102: mol_type = other DNA
gattagcaatcgatagttttagagctaccctggcggaacgttcgagtaatttttttttcagccaactccaattttttttattactcgaacgttccgccaggg

SEQ ID NO: 1928 - DNA, 102 bp, synthetic construct
  source 1..102: mol_type = other DNA
gtgtcacaacaagacgttttagagctaccctggcggaacgttcgagtaatttttttttcagccaactccaattttttttattactcgaacgttccgccaggg

SEQ ID NO: 1929 - DNA, 101 bp, synthetic construct
  source 1..101: mol_type = other DNA
gccccgagtgaagtgttttagagctacctacactcgacatcggtagctattttttttcagccaactccaatttttttttagctaccgatgtcgagtgtagg

SEQ ID NO: 1930 - DNA, 102 bp, synthetic construct
  source 1..102: mol_type = other DNA
gcggcccggggaattgttttagagctacctacactcgacatcggtagctattttttttcagccaactccaatttttttttagctaccgatgtcgagtgtagg

SEQ ID NO: 1931 - DNA, 102 bp, synthetic construct
  source 1..102: mol_type = other DNA
gattagcaatcgatagttttagagctacctacactcgacatcggtagctattttttttcagccaactccaatttttttttagctaccgatgtcgagtgtagg

SEQ ID NO: 1932 - DNA, 102 bp, synthetic construct
  source 1..102: mol_type = other DNA
gtgtcacaacaagacgttttagagctacctacactcgacatcggtagctattttttttcagccaactccaatttttttttagctaccgatgtcgagtgtagg

SEQ ID NO: 1933 - skipped

SEQ ID NO: 1934 - DNA, 29 bp, synthetic construct
  source 1..29: mol_type = other DNA
ttttttttcagccaactccaatttttttt

SEQ ID NO: 1935 - DNA, 12 bp, synthetic construct
  source 1..12: mol_type = other DNA
gttttagagcta

SEQ ID NO: 1936-1939 - skipped (4 entries)

SEQ ID NO: 1940 - DNA, 14 bp, synthetic construct
  source 1..14: mol_type = other DNA
tgtgacacatacat

SEQ ID NO: 1941 - DNA, 14 bp, synthetic construct
  source 1..14: mol_type = other DNA
gggcggccgacagg

SEQ ID NO: 1942 - DNA, 14 bp, synthetic construct
  source 1..14: mol_type = other DNA
gtgcccggactctg

SEQ ID NO: 1943 - DNA, 14 bp, synthetic construct
  source 1..14: mol_type = other DNA
ccctggctccggac

SEQ ID NO: 1944 - DNA, 14 bp, synthetic construct
  source 1..14: mol_type = other DNA
cgccagcctcgaaa

SEQ ID NO: 1945 - DNA, 14 bp, synthetic construct
  source 1..14: mol_type = other DNA
gaaccgcccgcccc

SEQ ID NO: 1946 - DNA, 14 bp, synthetic construct
  source 1..14: mol_type = other DNA
cggcgcactagggg

SEQ ID NO: 1947 - DNA, 14 bp, synthetic construct
  source 1..14: mol_type = other DNA
gccccgggtttggg

SEQ ID NO: 1948 - DNA, 14 bp, synthetic construct
  source 1..14: mol_type = other DNA
ccgcagcctagctt

SEQ ID NO: 1949 - DNA, 14 bp, synthetic construct
  source 1..14: mol_type = other DNA
tgacggacaggcgt

SEQ ID NO: 1950 - DNA, 14 bp, synthetic construct
  source 1..14: mol_type = other DNA
cggggccgcgtcct

SEQ ID NO: 1951 - DNA, 14 bp, synthetic construct
  source 1..14: mol_type = other DNA
cagaggcctttaaa

SEQ ID NO: 1952 - DNA, 14 bp, synthetic construct
  source 1..14: mol_type = other DNA
gcgtggggtaaggg

SEQ ID NO: 1953 - DNA, 14 bp, synthetic construct
  source 1..14: mol_type = other DNA
cacggcaatttctc

SEQ ID NO: 1954 - DNA, 14 bp, synthetic construct
  source 1..14: mol_type = other DNA
gtgacgctaatatg

SEQ ID NO: 1955 - DNA, 14 bp, synthetic construct
  source 1..14: mol_type = other DNA
cctaggggtaggga

SEQ ID NO: 1956 - DNA, 14 bp, synthetic construct
  source 1..14: mol_type = other DNA
aggggcgggtccga

SEQ ID NO: 1957 - DNA, 14 bp, synthetic construct
  source 1..14: mol_type = other DNA
ctaagcagcaacgt

SEQ ID NO: 1958 - DNA, 14 bp, synthetic construct
  source 1..14: mol_type = other DNA
gctagctccccacc

SEQ ID NO: 1959 - DNA, 14 bp, synthetic construct
  source 1..14: mol_type = other DNA
agctgcatggtgat

SEQ ID NO: 1960 - DNA, 14 bp, synthetic construct
  source 1..14: mol_type = other DNA
ccttacaggagttt

SEQ ID NO: 1961 - DNA, 14 bp, synthetic construct
  source 1..14: mol_type = other DNA
cactattactggag

SEQ ID NO: 1962 - DNA, 14 bp, synthetic construct
  source 1..14: mol_type = other DNA
actgcctaccactg

SEQ ID NO: 1963 - DNA, 14 bp, synthetic construct
  source 1..14: mol_type = other DNA
tgtatcacattctg

SEQ ID NO: 1964 - DNA, 14 bp, synthetic construct
  source 1..14: mol_type = other DNA
aagaggtaagtcgt

SEQ ID NO: 1965 - DNA, 14 bp, synthetic construct
  source 1..14: mol_type = other DNA
gcgcgcggcaatgc

SEQ ID NO: 1966 - DNA, 14 bp, synthetic construct
  source 1..14: mol_type = other DNA
aaggagcctagccg

SEQ ID NO: 1967 - DNA, 14 bp, synthetic construct
  source 1..14: mol_type = other DNA
acgcggtgccccaa

SEQ ID NO: 1968 - DNA, 14 bp, synthetic construct
  source 1..14: mol_type = other DNA
taaccacacaatga

SEQ ID NO: 1969 - DNA, 14 bp, synthetic construct
  source 1..14: mol_type = other DNA
actctcttgtattc

SEQ ID NO: 1970 - DNA, 14 bp, synthetic construct
  source 1..14: mol_type = other DNA
aacaatggccaagc

SEQ ID NO: 1971 - DNA, 14 bp, synthetic construct
  source 1..14: mol_type = other DNA
ttctgtcttcaata

SEQ ID NO: 1972 - DNA, 14 bp, synthetic construct
  source 1..14: mol_type = other DNA
ctctagacaacctc

SEQ ID NO: 1973 - DNA, 14 bp, synthetic construct
  source 1..14: mol_type = other DNA
gacaagttgtttac

SEQ ID NO: 1974 - DNA, 14 bp, synthetic construct
  source 1..14: mol_type = other DNA
agagagcctagaaa

SEQ ID NO: 1975 - DNA, 14 bp, synthetic construct
  source 1..14: mol_type = other DNA
ggtcaaggagtcct

SEQ ID NO: 1976 - DNA, 14 bp, synthetic construct
  source 1..14: mol_type = other DNA
ttgagagcaacacg

SEQ ID NO: 1977 - DNA, 14 bp, synthetic construct
  source 1..14: mol_type = other DNA
tcatgaccagcaaa

SEQ ID NO: 1978 - DNA, 14 bp, synthetic construct
  source 1..14: mol_type = other DNA
cggtcaccgcggcc

SEQ ID NO: 1979 - DNA, 14 bp, synthetic construct
  source 1..14: mol_type = other DNA
gtgcaaataacaaa

SEQ ID NO: 1980 - DNA, 14 bp, synthetic construct
  source 1..14: mol_type = other DNA
ccaaatgcaaggat

SEQ ID NO: 1981 - DNA, 14 bp, synthetic construct
  source 1..14: mol_type = other DNA
ccaatccttgcatt

SEQ ID NO: 1982 - DNA, 14 bp, synthetic construct
  source 1..14: mol_type = other DNA
gtgatagttagcaa

SEQ ID NO: 1983 - DNA, 14 bp, synthetic construct
  source 1..14: mol_type = other DNA
tgaaaaagaactcc

SEQ ID NO: 1984 - DNA, 14 bp, synthetic construct
  source 1..14: mol_type = other DNA
ataagctcaaaagc

SEQ ID NO: 1985 - DNA, 14 bp, synthetic construct
  source 1..14: mol_type = other DNA
agttggagttacta

SEQ ID NO: 1986 - DNA, 14 bp, synthetic construct
  source 1..14: mol_type = other DNA
ttcaaggacatgaa

SEQ ID NO: 1987 - DNA, 14 bp, synthetic construct
  source 1..14: mol_type = other DNA
aactacactcagtt

SEQ ID NO: 1988 - DNA, 14 bp, synthetic construct
  source 1..14: mol_type = other DNA
gggttccacgcctt

SEQ ID NO: 1989 - DNA, 14 bp, synthetic construct
  source 1..14: mol_type = other DNA
gtttgttctaccta

SEQ ID NO: 1990 - DNA, 14 bp, synthetic construct
  source 1..14: mol_type = other DNA
gagcaaaacaattt

SEQ ID NO: 1991 - DNA, 14 bp, synthetic construct
  source 1..14: mol_type = other DNA
taaatgtgcctgac

SEQ ID NO: 1992 - DNA, 14 bp, synthetic construct
  source 1..14: mol_type = other DNA
tgatgttgcacgac

SEQ ID NO: 1993 - DNA, 14 bp, synthetic construct
  source 1..14: mol_type = other DNA
tgaagcaactacta

SEQ ID NO: 1994 - DNA, 14 bp, synthetic construct
  source 1..14: mol_type = other DNA
atcggcgagaccag

SEQ ID NO: 1995 - DNA, 14 bp, synthetic construct
  source 1..14: mol_type = other DNA
tgagacaagaggcg

SEQ ID NO: 1996 - DNA, 14 bp, synthetic construct
  source 1..14: mol_type = other DNA
ctcaggcgcgagac

SEQ ID NO: 1997 - DNA, 14 bp, synthetic construct
  source 1..14: mol_type = other DNA
gctttctttatggg

SEQ ID NO: 1998 - DNA, 14 bp, synthetic construct
  source 1..14: mol_type = other DNA
aggtcgccgcgcgg

SEQ ID NO: 1999 - DNA, 14 bp, synthetic construct
  source 1..14: mol_type = other DNA
gcccggctacccat

SEQ ID NO: 2000 - DNA, 14 bp, synthetic construct
  source 1..14: mol_type = other DNA
caaacttacacact

SEQ ID NO: 2001 - DNA, 14 bp, synthetic construct
  source 1..14: mol_type = other DNA
aaagggcggacggt

SEQ ID NO: 2002 - DNA, 14 bp, synthetic construct
  source 1..14: mol_type = other DNA
attggacccgattt

SEQ ID NO: 2003 - DNA, 14 bp, synthetic construct
  source 1..14: mol_type = other DNA
gtggctctaaggtg

SEQ ID NO: 2004 - DNA, 14 bp, synthetic construct
  source 1..14: mol_type = other DNA
tgagacgtagggat

SEQ ID NO: 2005 - DNA, 14 bp, synthetic construct
  source 1..14: mol_type = other DNA
gcgagtcttgccat

SEQ ID NO: 2006 - DNA, 14 bp, synthetic construct
  source 1..14: mol_type = other DNA
ggaccggacaggga

SEQ ID NO: 2007 - DNA, 14 bp, synthetic construct
  source 1..14: mol_type = other DNA
ccgcccaatgaggg

SEQ ID NO: 2008 - DNA, 14 bp, synthetic construct
  source 1..14: mol_type = other DNA
aaaagttcggatct

SEQ ID NO: 2009 - DNA, 14 bp, synthetic construct
  source 1..14: mol_type = other DNA
gtcgccattggcca

SEQ ID NO: 2010 - DNA, 14 bp, synthetic construct
  source 1..14: mol_type = other DNA
ctccctcgcctata

SEQ ID NO: 2011 - DNA, 14 bp, synthetic construct
  source 1..14: mol_type = other DNA
ggcccgggagccgg

SEQ ID NO: 2012 - DNA, 14 bp, synthetic construct
  source 1..14: mol_type = other DNA
atcctttcgggcgc

SEQ ID NO: 2013 - DNA, 14 bp, synthetic construct
  source 1..14: mol_type = other DNA
atgcacacgtcact

SEQ ID NO: 2014 - DNA, 14 bp, synthetic construct
  source 1..14: mol_type = other DNA
gaacggagtagtct

SEQ ID NO: 2015 - DNA, 14 bp, synthetic construct
  source 1..14: mol_type = other DNA
gggattctgggcga

SEQ ID NO: 2016 - DNA, 14 bp, synthetic construct
  source 1..14: mol_type = other DNA
accccgaggaaggg

SEQ ID NO: 2017 - DNA, 14 bp, synthetic construct
  source 1..14: mol_type = other DNA
gcgctagggttcgg

SEQ ID NO: 2018 - DNA, 14 bp, synthetic construct
  source 1..14: mol_type = other DNA
agccccatccggag

SEQ ID NO: 2019 - DNA, 14 bp, synthetic construct
  source 1..14: mol_type = other DNA
ggcctgacgtgagg

SEQ ID NO: 2020 - DNA, 14 bp, synthetic construct
  source 1..14: mol_type = other DNA
gccccgagtgaagt

SEQ ID NO: 2021 - DNA, 14 bp, synthetic construct
  source 1..14: mol_type = other DNA
cggcccggggaatt

SEQ ID NO: 2022 - DNA, 14 bp, synthetic construct
  source 1..14: mol_type = other DNA
attagcaatcgata

SEQ ID NO: 2023 - DNA, 14 bp, synthetic construct
  source 1..14: mol_type = other DNA
tgtcacaacaagac

SEQ ID NO: 2024 - DNA, 23 bp, synthetic construct
  source 1..23: mol_type = other DNA
cctacactcgacatcggtagcta

SEQ ID NO: 2025 - DNA, 23 bp, synthetic construct
  source 1..23: mol_type = other DNA
ccctggcggaacgttcgagtaat

SEQ ID NO: 2026 - DNA, 23 bp, synthetic construct
  source 1..23: mol_type = other DNA
cctacacgatagtggtcgtgcgc

SEQ ID NO: 2027 - DNA, 23 bp, synthetic construct
  source 1..23: mol_type = other DNA
cccgaactctctatcgaacgagt

SEQ ID NO: 2028 - DNA, 23 bp, synthetic construct
  source 1..23: mol_type = other DNA
ccatggcacgatcgacacggagg

SEQ ID NO: 2029 - DNA, 23 bp, synthetic construct
  source 1..23: mol_type = other DNA
ccaaagctcattcgcgactgagc

SEQ ID NO: 2030 - DNA, 23 bp, synthetic construct
  source 1..23: mol_type = other DNA
ccgacgtctacggacgggagcta

SEQ ID NO: 2031 - DNA, 23 bp, synthetic construct
  source 1..23: mol_type = other DNA
cccgagaggtagtagacgacgca

SEQ ID NO: 2032 - DNA, 23 bp, synthetic construct
  source 1..23: mol_type = other DNA
cccgtcgtcacgtatgcgtagca

SEQ ID NO: 2033 - DNA, 23 bp, synthetic construct
  source 1..23: mol_type = other DNA
cctatagtcacgaatcgtagggt

SEQ ID NO: 2034 - DNA, 23 bp, synthetic construct
  source 1..23: mol_type = other DNA
ccgcggacggtaagcacggaata

SEQ ID NO: 2035 - DNA, 23 bp, synthetic construct
  source 1..23: mol_type = other DNA
cccttactcgcgatactctcgac

SEQ ID NO: 2036 - DNA, 23 bp, synthetic construct
  source 1..23: mol_type = other DNA
ccgatcaatgcggtctgcgtaac

SEQ ID NO: 2037 - DNA, 23 bp, synthetic construct
  source 1..23: mol_type = other DNA
cccgttatcgacgttcaaggaac

SEQ ID NO: 2038 - DNA, 23 bp, synthetic construct
  source 1..23: mol_type = other DNA
ccgatagtgctaaacgacgcttt

SEQ ID NO: 2039 - DNA, 23 bp, synthetic construct
  source 1..23: mol_type = other DNA
cctcgtactagtctcgcatgacc

SEQ ID NO: 2040 - DNA, 23 bp, synthetic construct
  source 1..23: mol_type = other DNA
ccatagcggtactatcggcatct

SEQ ID NO: 2041 - DNA, 23 bp, synthetic construct
  source 1..23: mol_type = other DNA
ccgctaggacgttcaacggagtc

SEQ ID NO: 2042 - DNA, 23 bp, synthetic construct
  source 1..23: mol_type = other DNA
ccgcatcgtattatctgcgaagc

SEQ ID NO: 2043 - DNA, 23 bp, synthetic construct
  source 1..23: mol_type = other DNA
cctggttatagcggacgcactgt

SEQ ID NO: 2044 - DNA, 24 bp, synthetic construct
  source 1..24: mol_type = other DNA
cctgaaggtaaagatcgggtcctc

SEQ ID NO: 2045 - DNA, 24 bp, synthetic construct
  source 1..24: mol_type = other DNA
ccttcccgacttccgtaggagcgc

SEQ ID NO: 2046 - DNA, 24 bp, synthetic construct
  source 1..24: mol_type = other DNA
ccgtcgttgtaccgtctacttgac

SEQ ID NO: 2047 - DNA, 23 bp, synthetic construct
  source 1..23: mol_type = other DNA
tagctaccgatgtcgagtgtagg

SEQ ID NO: 2048 - DNA, 23 bp, synthetic construct
  source 1..23: mol_type = other DNA
attactcgaacgttccgccaggg

SEQ ID NO: 2049 - DNA, 23 bp, synthetic construct
  source 1..23: mol_type = other DNA
gcgcacgaccactatcgtgtagg

SEQ ID NO: 2050 - DNA, 23 bp, synthetic construct
  source 1..23: mol_type = other DNA
actcgttcgatagagagttcggg

SEQ ID NO: 2051 - DNA, 23 bp, synthetic construct
  source 1..23: mol_type = other DNA
cctccgtgtcgatcgtgccatgg

SEQ ID NO: 2052 - DNA, 23 bp, synthetic construct
  source 1..23: mol_type = other DNA
gctcagtcgcgaatgagctttgg

SEQ ID NO: 2053 - DNA, 23 bp, synthetic construct
  source 1..23: mol_type = other DNA
tagctcccgtccgtagacgtcgg

SEQ ID NO: 2054 - DNA, 23 bp, synthetic construct
  source 1..23: mol_type = other DNA
tgcgtcgtctactacctctcggg

SEQ ID NO: 2055 - DNA, 23 bp, synthetic construct
  source 1..23: mol_type = other DNA
tgctacgcatacgtgacgacggg

SEQ ID NO: 2056 - DNA, 23 bp, synthetic construct
  source 1..23: mol_type = other DNA
accctacgattcgtgactatagg

SEQ ID NO: 2057 - DNA, 23 bp, synthetic construct
  source 1..23: mol_type = other DNA
tattccgtgcttaccgtccgcgg

SEQ ID NO: 2058 - DNA, 23 bp, synthetic construct
  source 1..23: mol_type = other DNA
gtcgagagtatcgcgagtaaggg

SEQ ID NO: 2059 - DNA, 23 bp, synthetic construct
  source 1..23: mol_type = other DNA
gttacgcagaccgcattgatcgg

SEQ ID NO: 2060 - DNA, 23 bp, synthetic construct
  source 1..23: mol_type = other DNA
gttccttgaacgtcgataacggg

SEQ ID NO: 2061 - DNA, 23 bp, synthetic construct
  source 1..23: mol_type = other DNA
aaagcgtcgtttagcactatcgg

SEQ ID NO: 2062 - DNA, 23 bp, synthetic construct
  source 1..23: mol_type = other DNA
ggtcatgcgagactagtacgagg

SEQ ID NO: 2063 - DNA, 23 bp, synthetic construct
  source 1..23: mol_type = other DNA
agatgccgatagtaccgctatgg

SEQ ID NO: 2064 - DNA, 23 bp, synthetic construct
  source 1..23: mol_type = other DNA
gactccgttgaacgtcctagcgg

SEQ ID NO: 2065 - DNA, 23 bp, synthetic construct
  source 1..23: mol_type = other DNA
gcttcgcagataatacgatgcgg

SEQ ID NO: 2066 - DNA, 23 bp, synthetic construct
  source 1..23: mol_type = other DNA
acagtgcgtccgctataaccagg

SEQ ID NO: 2067 - DNA, 24 bp, synthetic construct
  source 1..24: mol_type = other DNA
gaggacccgatctttaccttcagg

SEQ ID NO: 2068 - DNA, 24 bp, synthetic construct
  source 1..24: mol_type = other DNA
gcgctcctacggaagtcgggaagg

SEQ ID NO: 2069 - DNA, 24 bp, synthetic construct
  source 1..24: mol_type = other DNA
gtcaagtagacggtacaacgacgg

1.-11. (canceled)

12. A method for conversion of a plurality of stem cells into a plurality of chondrogenic cells, via modulation of expression levels of a plurality of distinct target genes comprising a first distinct target gene and a second distinct target gene, the method comprising:
a) contacting a first polynucleotide sequence in the plurality of stem cells by a first heterologous gene regulating moiety to modulate expression level of the first distinct target gene that is operatively coupled to the first polynucleotide sequence; and
b) contacting a second polynucleotide sequence in the plurality of stem cells by a second heterologous gene regulating moiety, to modulate expression level of the second distinct target gene that is operatively coupled to the second polynucleotide sequence, wherein a combination of the first and second distinct target genes is:
i) a first homeobox protein and a second homeobox protein that are different;
ii) two different members selected from the group consisting of a homeobox protein, a T-box transcription factor (TBX), and a basic helix-loop-helix transcription factor (bHLH); or
iii) a first member selected from the group consisting of the homeobox protein, the TBX, and the bHLH, and a second member comprising SOX or collagen.

13. The method of claim 12, wherein the combination is (i) the first homeobox protein and the second homeobox protein.

14. The method of claim 12, wherein the combination is (ii) the two different members selected from the group consisting of the homeobox protein, the TBX, and the bHLH.

15. The method of claim 12, wherein the combination is (iii) the first member selected from the group consisting of the homeobox protein, the TBX, and the bHLH, and the second member comprising the SOX or the collagen.

16. The method of claim 12, wherein (b) is performed subsequent to (a), thereby to effect modulation of the first distinct target gene and the second distinct target gene in a sequential manner.

17. The method of claim 12, wherein (i) the first polynucleotide sequence is upstream to or encodes the first distinct target gene or (ii) the second polynucleotide sequence is upstream to or encodes the second distinct target gene.

18. The method of claim 12, wherein (i) the expression level of the first distinct target gene is enhanced upon the contacting by the first heterologous gene regulating moiety or (ii) the expression level of the second distinct target gene is enhanced upon the contacting by the second heterologous gene regulating moiety.

19. The method of claim 12, wherein the method comprises contacting the plurality of stem cells with a heterologous genetic circuit comprising a plurality of gate units, wherein the heterologous genetic circuit is activatable to induce the plurality of gate units to modulate expression levels of the plurality of distinct target genes in a sequential manner to effect the conversion, and wherein the plurality of gate units comprises:
(i) a first gate unit that is preconfigured to effect the first heterologous gene regulating moiety to modulate the expression level of the first distinct target gene; and
(ii) a second gate unit that is preconfigured to effect the second heterologous gene regulating moiety to modulate the expression level of the second distinct target gene,
wherein, upon activation of the heterologous genetic circuit, the plurality of gate units operates to effect the conversion.

20. The method of claim 12, wherein the conversion occurs in less than about 14 days, less than about 10 days, less than about 7 days, or less than about 5 days.

21.-30. (canceled)

31. A method for treating a subject in need thereof, the method comprising:
administering a plurality of chondrogenic cells to the subject, wherein the plurality of chondrogenic cells is prepared by subjecting a plurality of stem cells to ex vivo differentiation,
wherein, within less than 7 days of the ex vivo differentiation, a conversion rate from the plurality of stem cells to the plurality of chondrogenic cells is characterized to be at least about 30%.

32. The method of claim 31, wherein the conversion rate is at least about 40%, at least about 50%, at least about 60%, at least about 70%, or at least about 80%.

33. The method of claim 31, wherein the conversion rate is observed within less than about 6 days following the contacting or within less than about 5 days following the contacting.

34. The method of claim 31, wherein the plurality of chondrogenic cells is subjected to ex vivo culture for less than about 2 weeks, less than about 10 days, less than about 8 days, less than about 7 days, less than about 6 days, or less than about 5 days.

35. The method of claim 31, wherein the ex vivo differentiation comprises modulating expression level of a target gene comprising one or more members selected from the group consisting of a homeobox protein, a T-box transcription factor (TBX), a basic helix-loop-helix transcription factor (bHLH), a SOX, and a collagen.

36. The method of claim 35, wherein the target gene is an endogenous target gene.

37. The method of claim 35, wherein the target gene comprises a plurality of distinct target genes that comprises:
(i) a first homeobox protein and a second homeobox protein that are different;
(ii) two different members selected from the group consisting of a homeobox protein, a T-box transcription factor (TBX), and a basic helix-loop-helix transcription factor (bHLH); or
(iii) a first member selected from the group consisting of the homeobox protein, the TBX, and the bHLH, and a second member comprising SOX or collagen.

38. The method of claim 12, wherein the plurality of chondrogenic cells comprises chondroprogenitor cells or chondrocytes.

39. The method of claim 12, wherein the plurality of chondrogenic cells is characterized to be CD146+/CD73+, CD146+/CD112+, or CD326+/CD309+.

40. The method of claim 12, wherein the plurality of stem cells comprise pluripotent stem cells (PSCs) or mesodermal cells.

41.-68. (canceled)

69. A system for conversion of a plurality of stem cells into a plurality of chondrogenic cells, via modulation of expression levels of a plurality of distinct target genes comprising a first distinct target gene and a second distinct target gene, the system comprising:
a. a first heterologous gene regulating moiety configured to bind a first polynucleotide sequence in the plurality of stem cells to modulate expression level of the first distinct target gene that is operatively coupled to the first polynucleotide sequence; and
b. a second heterologous gene regulating moiety configured to bind a second polynucleotide sequence in the plurality of stem cells to modulate expression level of the second distinct target gene that is operatively coupled to the second polynucleotide sequence,
wherein a combination of the first and second distinct target genes is:
(i) a first homeobox protein and a second homeobox protein that are different;
(ii) two different members selected from the group consisting of a homeobox protein, a T-box transcription factor (TBX), and a basic helix-loop-helix transcription factor (bHLH); or
(iii) first member selected from the group consisting of the homeobox protein, the TBX, and the bHLH, and a second member comprising SOX or collagen.

70.-71. (canceled)
